(19) United States
(12) Patent Application Publication
(10) Pub. No.: US 2006/0147371 A1
(43) Pub. Date: Jul. 6, 2006

(54) Water-soluble compound

(76) Inventors: Jack A. Tuszynski, Edmonton (CA); Howard J. Greenwald, East Rochester, NY (US); Stephen H. Curry, Rochester, NY (US); Kendrick Goss, Brighton, MA (US)

Correspondence Address: Buchanan Ingersoll PC;Burns, Doane, Swecker & Mathis, P.O. Box 1404, Alexandria, VA, 22313-1404, US

(21) Appl. No.: 11/063,439

(22) Filed: Feb. 23, 2005

Related U.S. Application Data
(63) Continuation of application No. 10/923,615, filed on Aug. 20, 2004.
(63) Continuation-in-part of application No. 10/808,618, filed on Mar. 24, 2004.
(63) Continuation-in-part of application No. 10/867,517, filed on Jun. 14, 2004.
(63) Continuation-in-part of application No. 10/878,905, filed on Jun. 28, 2004.
(60) Provisional application No. 60/516,134, filed on Oct. 31, 2003.

(51) Int. Cl. A61K 51/00; A61K 49/10

(52) U.S. Cl. 424/1.11; 424/9.32

(57) ABSTRACT

A water-soluble magnetic anti-mitotic compound with a water-solubility of at least 100 micrograms per milliliter, a molecular weight of at least 150 grams per mole, a mitotic index factor of at least 10 percent, a positive magnetic susceptibility of at least 1,000×10⁻⁶ cgs, and a magnetic moment of at least 0.5 bohr magnetrons, wherein said compound is comprised of at least 7 carbon atoms and at least one inorganic atom with a positive magnetic susceptibility of at least 200×10⁻⁶ cgs.

### CROSS-REFERENCE TO RELATED PATENT APPLICATIONS

[0001] This application is a continuation of applicants' co-pending patent application U.S. Ser. No. 10/923,615, filed on Aug. 20, 2004 which claims priority from U.S. provisional patent application U.S. Ser. No. 60/516,134, filed on Oct. 31, 2003. The entire disclosure of each of these patent applications is hereby incorporated by reference into this specification.

[0002] This application is a continuation-in-part of applicants' U.S. patent application Ser. No. 10/808,618 (filed on Mar. 24, 2004), of applicants' U.S. patent application Ser. No. 10/867,517 (filed on Jun. 14, 2004), and of applicants' U.S. patent application Ser. No. 10/878,905 (filed on Jun. 28, 2004). The entire disclosure of each of these patent applications is hereby incorporated by reference into this specification.

### INCORPORATION BY REFERENCE OF MATERIAL SUBMITTED ON A COMPACT DISC

[0003] Reference is hereby made to a Sequence Listing, a Table, and/or a Computer Program Listing appendix that was submitted on compact disc. The entire content of this compact disc is hereby incorporated by reference into this specification.

### FIELD OF THE INVENTION

[0004] A water-soluble magnetic anti-mitotic compound with a water-solubility of at least 100 micrograms per milliliter, a molecular weight of at least 150 grams per mole, a mitotic index factor of at least 10 percent, a positive magnetic susceptibility of at least 1,000×10⁻⁶ cgs, and a magnetic moment of at least 0.5 bohr magnetrons, wherein said compound is comprised of at least 7 carbon atoms and at least one inorganic atom with a positive magnetic susceptibility of at least 200×10⁻⁶ cgs.

### BACKGROUND OF THE INVENTION

[0005] Paclitaxel is a complex diterpenoid that is widely used as an anti-mitotic agent; it consists of a bulky, fused ring system and an extended side chain that is required for its activity. See, e.g., page 112 of Gunda I. Georg's “Taxane Anticancer Aents: Basic Science and Current Status,” ACS Symposium Series 583 (American Chemical Society, Washington, D.C., 1995).

[0006] The aqueous solubility of paclitaxel is relatively low. Thus, as is disclosed at page 112 of such Georg text, estimates of paclitaxel solubility vary widely, ranging from about 30 micrograms per milliliter and about 7 micrograms per milliliter to less than 0.7 micrograms per milliter.

[0007] The molecular weight of paclitaxel is in excess of 700; this relatively high molecular weight is one factor that, according to the well-known “rule of 5,” contributes to paclitaxel's poor water solubility.

[0008] The “rule of 5” was set forth by Christopher A. Lipinski et al. in an article entitled “Experimental and computational approaches to estimate solubility and permeability in drug discovery and development settings,” Adv. Drug Delivery Rev., 1997, 23(1-3), 3-25. In this article, it was disclosed that: “In the USAN set we found that the sum of Ns and Os in the molecular formula was greater than 10 in 12% of the compounds. Eleven percent of compounds had a MWT of over 500 . . . . The ‘rule of 5’ states that: poor absorption of permeation is more likely where: A. There are more than 5 H-bond donors (expressed as the sum of OHs and NHs); B. The MWT is over 500; C. The LogP is over 500 . . . ; D. There are more than 10H-bond acceptors (expressed as the sum of Ns and Os).”

[0009] The Lipinksi “rule of 5” has also erroneously been referred to as the “Pfizer rule of 5,” as is illustrated by U.S. Pat. No. 6,675,136, the entire disclosure of which is hereby incorporated by reference into this specification. As is disclosed in such patent, “To further illustrate the versatility of the present technique, we also introduce the concept of ‘anchor’ objects. Anchor objects are molecules situated at the corners of a region of the drug space that is defined by Pfizer's ‘rule of 5’. This rule has been empirically derived by a computer analysis of known drugs, as described by Christopher A. Pfizer and co-workers in Adv. Drug Delivery Rev., vol. 23, pp. 3-25 (1997). The “rule of 5” is focused on drug permeability and oral absorption . . . . According to Pfizer's “rule of 5”, LIPO and HBDON are between 0 and 5, HBACC is between 0 and 10, and M.W. has a maximum of 500.”

[0010] The problems that high molecular weight compounds have with poor water solubility are discussed in U.S. Pat. No. 6,667,048 of Karel J. Lambert et al., which discloses an “emulsion vehicle for a poorly soluble drug.” In the “background of the invention” section of this patent, it is disclosed that: “Hundreds of medically useful compounds are discovered every year, but clinical use of these drugs is possible only if a drug delivery vehicle is developed to transport them to their therapeutic target in the human body. This problem is prticularly critical for drugs requiring intraveneous injection in order to reach their therapeutic target or dosage but which are water insoluble or poorly water insoluble. For such hydrophobic compounds, direct injection may be impossible or highly dangerous, and can result in hemolysis, phlebitis, hypersensitivity, organ failure and/or death. Such compounds are termed by pharmacists ‘lipophilic,’ ‘hydrophobic,’or in their most difficult form, ‘aamphiphobic’ . . . . A few examples of therapeutic substances in these categories are ibuprofen, diazepam, grisefulvin, cyclosporin, cortisone, proleukin, cortisone, proleukin, etoposide and paclitaxel . . . . ”

[0011] As is also disclosed in U.S. Pat. No. 6,667,048, “Administration of chemotherapuetic or anti-cancer agents is particularly problematic. Low solubility anti-cancer agents are difficult to solubulize and supply at therapeutically useful levels. On the other hand, water-soluble anti-cancer agents are generally taken up by both cancer and non-cancer cells thereby exhibiting non-specificity . . . . Efforts to improve water-solubility and comfort of administration of such agents have not solved, and may have worsened, the two fundamental problems of cancer chemotherapy: 1) non-specific toxicity, and 2)rapid clearance from the bloodstream by non-specific mechanisms. In the case of cytotoxins, which form the majority of currently available chemotherapies, these two problems are clearly related. Whenever the therapeutic is taken up by noncancerous cells, a diminished amount of the drug remains available to treat the cancer, and more importantly, the normal cell ingesting the drug is killed.”

[0012] As is also disclosed in U.S. Pat. No. 6,667,048, “The chemotherapeutic must be present throughout the affected tissue(s) at high concentration for a sustained period of time so that it may be taken up by the cancer cells, but not at so high a concentration that normal cells are injured beyond repair. Obviously, water-soluble molecules can be admistered in this way, but only by slow, continuous infusion and monitoring, aspects which entail great difficulty, expense and inconvenience.”

[0013] It does not appear that the prior art has provided a water-soluble anti-mitotic agent that is capable of solving the problems discussed in U.S. Pat. No. 6,667,048. It is an object of this invention to provide such an agent. In particular, and in one embodiment, it is an object of this invention to provide a magentic anti-mitotic composition that can be directed to be more toxic to cancer cells than normal cells. Furthermore, and in another embodiment, it is another object of this invention to provide a delivery system that will provide a chemotherapeutic agent at a high concentration for a sustained period of time but not at such a high concentration that a substantial number of normal cells are injured beyond repair.

### SUMMARY OF THE INVENTION

[0014] In accordance with one embodiment of this invention, there is provided a water-soluble magnetic anti-mitotic compound with a water-solubility of at least 100 micrograms per milliliter, a molecular weight of at least 150 grams per mole, a mitotic index factor of at least 10 percent, a positive magnetic susceptibility of at least 1,000×10⁻⁶ cgs, and a magnetic moment of at least 0.5 bohr magnetrons, wherein said compound is comprised of at least 7 carbon atoms and at least one inorganic atom with a positive magnetic susceptibility of at least 200×10⁻⁶ cgs.

[0015] In accordance with yet another embodiment of this invention, there is provided a compound with molecular weight of at least about 550, a wter solubility of at least about 10 micrograms per milliliter, a pKa dissociation constant of from about 1 to about 15, and a partition coefficient of from about 1.0 to about 50.

### BRIEF DESCRIPTION OF THE DRAWINGS

[0016] The invention will be described with referene to the specification and the enclosed drawings, in which like numerals refer to like elements, and wherein:

[0017] FIG. 1 is a schematic illustration of one preferred implantable assembly of the invention;

[0018] FIG. 2 is a schematic illustration of a flow meter that may be used in conjunction with the implantable assembly of claim 1;

[0019] FIG. 3 is a flow diagram of one preferred process of the invention;

[0020] FIG. 4 is a flow diagram of another preferred process of the invention; and

[0021] FIG. 5 is a flow diagram of yet another preferred process of the invention.

### DESCRIPTION OF THE PREFERRED EMBODIMENTS

[0022] The magnetic anti-mitotic compound of this invention is particularly well-adapted to bind either to tubulin isotypes and/or microtubules comprised of such isotypes and/or various proteins that are involved in microtubule dynamics. In the first part of this specification, applicants will discuss the preparation of a database of tubulin isotopes. In the second part of this specification, applicants will discuss certain preferred, magnetic compounds that, in one embodiment, target such tubulin isotypes and/or the microtubules they make up.

A Process for Preparing a Tubulin Isotype Database

[0023] Tubulin is a component of microtubules. At the molecular level tubulin's roles are highly complex. For example, microtubules undergo cycles of rapid growth and disassembly in a process known as “dynamic instability” that appears to be critical for microtubule function. In one embodiment, the magnetic anti-mitotic compounds of this invention are capable of disrupting and/or modifying such process of “dynamic instability,” either by interacting with one or more tubulin isotypes, and/or one or more proteins involved in the dynamics of microtubule assembly and/or disassembly, and/or the microtubules themselves.

[0024] Both the alpha and the beta forms of tubulin consist of a series of isotypes, differing in amino acid sequence, each one encoded by a different gene. See, e.g., an article by Richard F. Luduena on “The multiple forms of tublin: different gene products and covalent modifications,” Int. Rev. Cytol. 178-107-275 (1998). Reference also may be had, e.g., to U.S. Pat. No. 6,306,615 (detection method for monitoring beta-tubulin isotype specific modification); the entire disclosure of this United States patent is hereby incorporated by reference into this specification.

[0025] An interesting discussion of tubulin isotypes is also presented in published United States patent application 2004/0121351, the entire disclosure of which is hereby incorporated by reference into this specification. As is disclosed in this published patent application, “Microtubules are essential to the eucaryotic cell due as they are involved in many processes and functions such as, e.g., being components of the cytoskeleton, of the centrioles and ciliums and in the formation of spindle fibres during mitosis. The constituents of microtubules are heterodimers consisting of one α-tubulin molecule and one β-tubulin molecule. These two related self-associating 50 kDa proteins are encoded by a multigen family. The various members of this multigen family are dispersed all over the human genome. Both α-tubulin and β-tubulin are most likely to originate from a common ancestor as their amino acid sequence shows a homology of up to 50%. In man there are at least 15 genes or pseudogenes for β-tubulin.”

[0026] As is also disclosed in published United States patent application 2004/0121351, “The conservation of structure and regulatory functions among the β-tubulin genes in three vertebrate species (chicken, mouse and human) allowed the identification of and categorization into six major classes of beta-tubulin polypeptide isotypes on the basis of their variable carboxyterminal ends. The specific, highly variable 15 carboxyterminal amino acids are very conserved among the various species. Beta-tubulins of categories I, II, and IV are closely related differing only 2-4% in contrast to categories III, V and VI which differ in 8-16% of amino acid positions [Sullivan K. F., 1988, Ann. Rev. Cell Biol. 4: 687-716] . . . . the expression pattern is very similar between the various species as can be taken from the following table [Sullivan K. F., 1988, Ann. Rev. Cell Biol. 4: 687-716] which comprises the respective human members of each class: 1 isotype member expression pattern class I HM 40 ubiquitous class II H β 9 mostly in the brain class III H β 4 exclusively in the brain class IVa H β 5 exclusively in the brain class IVb H β 2 ubiquitous . . . . “The C terminal end of the beta-tubulins starting from amino acid 430 is regarded as highly variable between the various classes. Additionally, the members of the same class seem to be very conserved between the various species. As tubulin molecules are involved in many processes and form part of many structures in the eucaryotic cell, they are possible targets for pharmaceutically active compounds. As tubulin is more particularly the main structural component of the microtubules it may act as point of attack for anticancer drugs such as vinblastin, colchicin, estramustin and taxol which interfere with microtubule function. The mode of action is such that cytostatic agents such as the ones mentioned above, bind to the carboxyterminal end the β-tubulin which upon such binding undergoes a conformational change. For example, Kavallaris et al. [Kavallaris et al. 1997, J. Clin. Invest. 100: 1282-1293] reported a change in the expression of of specific β-tubulin isotypes (class I, II, III, and IVa) in taxol resistant epithelial ovarian tumor. It was concluded that these tubulins are involved in the formation of the taxol resistence. Also a high expression of class III β-tubulins was found in some forms of lung cancer suggesting that this isotype may be used as a diagnostic marker.”

[0027] The function of certain tubulins in Taxol resistance was also discussed in U.S. Pat. No. 6,362,321, the entire disclosure of which is hereby incorporated by reference into this specification. As is disclosed in this patent, “Taxol is a natural product derived from the bark of Taxus brevafolio (Pacific yew). Taxol inhibits microtubule depolymerization during mitosis and results in subsequent cell death. Taxol displays a broad spectrum of tumorcidal activity including against breast, ovary and lung cancer (McGuire et al., 1996, N. Engld. J. Med. 334:1-6; and Johnson et al., 1996, J. Clin. Ocol. 14:2054-2060). While taxol is often effective in treatment of these malignancies, it is usually not curative because of eventual development of taxol resistance. Cellular resistance to taxol may include mechanisms such as enhanced expression of P-glycoprotein and alterations in tubulin structure through gene mutations in the β chain or changes in the ratio of tubulin isomers within the polymerized microtubule (Wahl et al., 1996, Nature Medicine 2:72-79; Horwitz et al., 1993, Natl. Cancer Inst. 15:55-61; Haber et al., 1995, J. Biol. Chem. 270:31269-31275; and Giannakakou et al., 1997, J. Biol. Chem. 272:17118-17125) . . . ” In one embodiment of this invention, the magnetetic anti-mitotic compound of this invention is used in conjunction with paclitaxel to provide an improved anti-cancer composition. Without wishing to be bound to any particular theory, applicants believe that their anti-mitotic compound targets a tubulin isotype that is responsible for the drug resistance to paclitaxel.

[0028] The increased presence of certain tubulin isotypes associated with certain types of cancers was noted in an article by Tien Yeh et al., “The B_{II} Isotype of Tubulin is Present in the Cell Nuclei of a Variety of Cancers,” Cell Motility and the Cytoskeleton 57:96-106 (2004). Constructs of these B_{II} isotypes and applicants' magnetic anti-mitotic compound comprise one embodiment of the present invention.

[0029] The Yeh et al. article discloses that both alpha-tubulin and beta-tubulin consist of a series of isotypes differieng in amino acid sequence, each one encoded by a different gene; and it refers to a 1998 article by Richard F. Luduena entitled “The multiple forms of tubulin: different gene products and covalent modifications,” Int. Rev. Cytol 178:207-275. The Yeh et al. article also disclosed that the B_{II} isotype of tubulin is present in the nuclei of many tumors, stating that “Three quarters (75%) of the tumors we examined contained nuclear the B_{II} (Table I).” The authors of the Yeh et al. article suggest that (at page 104) “ . . . it would be interesting to expore the possibility of using nuclear B_{II} as a chemotherapeutic target.”

[0030] It thus appears that many isotypes of tubulin might be “chemotherapeutic targets” such as, e.g., the “nuclear B_{II}” disclosed in the Yeh et al. article, or the “ . . . specific β-tubulin isotypes (class I, II, III, and IVa) . . . ” described in the Kavallaris et al. article (Kavallaris et al. 1997, J. Clin. Invest. 100: 1282-1293) and discussed in published United States patent application 2004/0121351. It also appears that many isotypes of tubulin are “ . . . targets for pharmaceutically active compounds . . . . ” The process of this invention may be used to identify these tubulin isotype targets, to model such targets, and to determine what therapeutic agents interact with such targets; and it may also be used to assist in the construction of anti-mitotic agents bound to such isotypes.

[0031] As is discussed in published United States patent application US2002/0106705 (the entire disclosure of which is hereby incorporated by reference into this specification), the therapeutic agent that interacts with the tubulin isotype target may be, e.g., a “β-tubulin modifying agent.” One such agent is described in US2002/0106705 as being “ . . . an agent that has the ability to specifically react with an amino acid residue of β-tubulin, preferably a cysteine, more preferably the cysteine residue at position 239 of a β-tubulin isotype such as β1- β2- or β4-tubulin and antigenic fragments thereof comprising the residue, preferably cysteine 239. The β-tubulin modifying agent of the invention can be, e.g., any sulfhydryl or disulfide modifying agent known to those of skill in the art that has the ability to react with the sulfur group on a cysteine residue, preferably cysteine residue 239 of a β-tubulin isotype. Preferably, the β-tubulin modifying agents are substituted benzene compounds, pentafluorobenzenesulfonamides, arylsulfonanilide phosphates, and derivatives, analogs, and substituted compounds thereof (see, e.g., U.S. Pat. No. 5,880,151; PCT 97/02926; PCT 97/12720; PCT 98/16781; PCT 99/13759; and PCT 99/16032, herein incorporated by reference; see also Pierce Catalogue, 1999/2000, and Means, Chemical Modification of Proteins). In one embodiment, the agent is 2-fluoro-1-methoxy-4-pentafluorophenylsulfonamidobenzene (compound 1; FIG. 1C). Modification of a β-tubulin isotype at an amino acid residue, e.g., cysteine 239, by an agent can be tested by treating a β-tubulin peptide, described herein, with the putative agent, followed by, e.g., elemental analysis for a halogen, e.g., fluorine, reverse phase HPLC, NMR, or sequencing and HPLC mass spectrometry. Optionally compound 1 described herein can be used as a positive control. Similarly, an α-tubulin modifying agent refers to an agent having the ability to specifically modify an amino acid residue of an α-tubulin.” In one embodiment of this invention, prior art beta-tubulin targeting agents are modified by making them water-soluble and/or magnetic in accordance with the process of this invention.

Identification of the Tubulin Isotype Targets

[0032] The tubulin isotypes that are potential chemotherapeutic targets are preferably those isotypes that are present in a higher concentration in diseased biological organisms than in normal biological organisms. They may be identified by, e.g., standard analytical techniques.

[0033] By way of illustration, and not limitation, an analysis may be done regarding the extent to which, if any, a beta-tubulin isotype, e.g., is present in tumors. As is described in the Yeh et al. paper cited elsewhere in this specification, one may study a variety of tumors by “standard immunohistochemical techniques” to determine the extent to which one or more tubulin isotypes if present in the tumors. Yeh et al. state that: “Tumors were randomly selected from the San Antonio Cancer Institute Tumor Bank to represent a variety of tumor types, grades, and stages. Benign tissues adjacent to the tumor were examined when possible. In addition to malignant tumors, selected benign lesions, such as meningiomas, and tumors of low malignant potential, such as giant cell tumors of bone, were also examined. All tissues were formalin-fixed and paraffin-embedded . . . Standard immunohistochemical techniques were utilized [Hsu et al., 1981]. The monoclonal antibody to the (BII isotype of tubulin (JDR.3B8) was at an initial concentration of 2 mg/mL and diluted 1:2,000, for a final concentration of 1 μg/mL. No antigen retrieval step was used because the antigen was easily accessible for immunohistochemical staining. Slides were incubated at room temperature with the primary antibody for 1 h. The sections were then exposed to a secondary biotinylated rabbit anti-mouse antibody (DAKO, cat no. E354, 1:100), then Streptavidin horseradish peroxidase was applied, followed by diaminobenzidine and OsO₄. Slides were counter-stained with methyl green. A positive skin control and negative controls (minus antibody) were run with each batch of tumors . . . . Slides were visualized using an Olympus BX-40 microscope, equipped with PlanFluorite objectives. The pattern and location of cells staining with the antibody to B11-tubulin were recorded. Intensity and proportion of cells stained were recorded in a semi-quantitative manner, as previously described [Allred et al., 1998] . . . . ”

Preparation of a Database of Tubulin Isotypes

[0034] In one embodiment of the process of this invention, a database of tubulin isotypes is prepared. In this section of the specification, excerpts from a paper that was prepared by one of the applicants is presented. The paper in question is entitled “Homology Modeling of Tubulin Isotypes and its Consequences for the Biophysical Properties of Tubulin and Microtubules.” One of the authors of this paper is applicant Jack A. Tuszynski; and such paper will hereinafter be referred to as the “Tuszynski paper.”

[0035] As is disclosed in the introductiory portion of the Tuszynski et al. paper, “Microtubules, cylindrical organelles found in all eukaryotes, are critically involved in a variety of cellular processes including motility, transport and mitosis.” As authority for this proposition, the paper cites a text by J. S. Hymans et al. entitled “Microtubules” (Wiley-Liss, New York, N.Y., 1994).

[0036] The Tuszynski paper also discloses that: “Their component protein, tubulin, is composed of two polypeptides of related sequence, designated α and β. In addition to α- and β-tubulin, many microtubules in cells require the related γ-tubulin for nucleation.” As authority for this proposition, there are cited articles by H. P. Erickson (“γ-tubulin nucleation, template or protofilament?,” Nature Cell Biology 2:E93-E96, 200) and by R. F. Luduena (“The multiple forms of tubulin: different gene products and covalent modifications,” Int. Rev. Cytol. 178:207-275, 1998).

[0037] The Tuszynski paper also discloses that: “Two other tubulins, designated δ and ε, are widespread, . . . although their roles are still uncertain . . . models utilizing them have been proposed.” As authority for this statement, the paper cites works by S. T. Vaughan et al. (“New tubulins in protozoal parasites,” Curr. Biol. 10:R258-R259, 2000) and Y. F. Inclan et al. (“Structural models for the self-assembly and microtubule interactions of . . . tubulin,” Journal of Cell Science 114:413-422, 2001).

[0038] The Tuszynski paper also discloses that: “At least three of these tubulins, namely, α, β, and γ, exist in many organisms as families of closely related isotypes. An enigmatic feature of tubulin is its heterogeneity. Not only can \tilde{α} and β-tubulin exist as multiple isotypes in many organisms, but the protein can also undergo various post-translational modifications, such as phosphorylation, acetylation, detyrosination, and polyglutamylation.” As authority for this statement, the paper cites a work by A. Banergee, “Coordination of posttranslational modificatioins of bovine brain. \tilde{α} tubulin, polyglycylation of delta2 tubulin,” Journal of Biological Chemistry 277:46140-46144, 2002).

[0039] The Tuszynski paper also discloses that “At the molecular level tubulin's roles are highly complex and are related to the structural variations observed.” As authority for this proposition, the article cites a work by K. L. Richards et al., “Structure-function relationships in yeast tubulins,” Molecular Biology of the Cell 11:1887-1903, 2000.

[0040] The Tuszynski paper also states that “ . . . microtubules undergo cycles of rapid growth and disassembly in a process known as dynamic instability that appears to be critical for microtubule function, especially in mitosis. A guanosine triphosphate (GTP) tubulin hydrolyzes bound GTP to GDP; the kinetics of this process in beta-tubulin is critical in regulating dynamic instability by affecting the loss of a so-called ‘cap’ that stabilizes the microtubule structure.” As authority for this statement, the article cites a work by T. J. Mitchison et al., “Dynamic instability of microtubule growth,” Nature 312:237-242, 1984.

[0041] The Tuszynski paper also discloses that “In addition to forming microtubules, tubulin interacts with a large number of associated proteins. Some of these, such as tektin, may play structural roles; others, the so-called microtubule-associated proteins (MAPs) such as tau or MAP2, may stabilize the microtubules, stimulate microtubule assembly and mediate interactions with other proteins. Still others, such as kinesin and dynein, are motor proteins that move cargoes, e.g., vesicles, along microtubules.” As authority for these statements, the article refers to works by M. Kikkawa et al. (“Switch-based mechanisms of kinesin motors,” Nature 411:439-445, 2001) and Z. Wang et al. (“The C-terminus of tubulin increases cytoplasmic dynein and kinesin processity,” Biophysical Journal 78:1955-1964, 2000).

[0042] As is also disclosed in the Tuszynski et al. paper, “The precise molecular basis of the properties of tubulin is still not well understood, in part because tubulin's highly flexible conformation . . . makes it difficult to crystallize this region.” As authority for this statement, the article cites a work by O. Keskin et al., “Relating molecular flexibility to function: a case study of tubulin,” Biphysical Journal 83:663-680, 2002.

[0043] The Tuszynski paper also discloses that: “In a major advance in the field, the three-dimensional structure of bovine brain tubulin has been determined by electron crystallography resulting in atomic structures available in the The Protein Data Bank (Berman et al. [2000] as entries 1TUB Nogales et al. (1998) and 1JFF Lowe et al. (2000).” The Berman et al. reference is to an article by H. M. Berman et al. on “The protein data bank,” Nucleic Acids Research 28:235-242, 2000. The Nogales et al. reference was to an article by E. Nogales et al. on the “Structure of the alpha/beta tubulin dimer by electron crystallography,” Nature 393: 199-203, 1998. The Lowe et al. reference is to an article by J. Lowe et al. on the “Refined structure of alpha/beta-tubulin at 3.5 angstrom resolution,” Journal of Molecular Biology 313:1045-1057 (2001).

[0044] The Tuszynski paper also discloses that “Once the three dimensional structure of a protein is known it is possible to use homology modeling to predict the structures of related forms of the protein with some degree of accuracy. We have applied these techniques to a series of 300 different tubulins, representing α- and β-tubulins from animals, plants, fungi and protists, as well as several γ-, δ- and ε-tubulins.” It should be noted that such “homology modeling” is frequently referred to in the patent literature. Reference may be had, e.g., to U.S. Pat. Nos. 5,316,935; 5,486,802; 5,686,255; 5,738,998; 6,027,720; 6,080,549; 6,197,589; 6,356,845; 6,433,158; 6,451,986; 6,468,770; 6,548,477; 6,654,644; 6,654,667; 6.627,746; and the like. The entire disclosure of each of these United States patents is hereby incorporated by reference into this specification.

[0045] The Tuszynski paper also discloses that: “For all of the resulting tubulin structures, we have been able to estimate the magnitudes and orientations of their dipole moments, charge distributions and surface to volume ratios. The magnitudes and orientations of the tubulin dimers' dipose moments appear to play significant roles in microtubule assembly and stability.”

[0046] The Tuszynski paper also discloses that “In addition, we have been able to generate plausible conformations for the C-terminal regions. Notably, the C-termini of alpha- and beta-tubulin were not resolved in the original crystallographic structures of tubulin due to their flexibility and possibly sample inhomgeneity.” As support for this statement, the article cited a work by E. Nogales et al., “Structure of the alpha/beta tubulin dimmer by electron crystallography,” Nature 393:199-203, 1998.

[0047] The Tuszynski paper also discloses that “The importance of these regions is highlighted by the fact that they are the site of most of tubulin's post-translational modifications, that they bind to MAPs and that differences among tubulin isotypes cluster here.”

[0048] The Tuszynski paper discusses the materials and methods used to construct the tublin isotype database. In one embodiment of the process used in the Tuszynksi paper, the “ . . . abundance of various homologous isotypes of tubulin, called alpha and beta (with additional indices labeling the isotypes) is correlated with the specific locations of the cells in which they are found. We have used the known amino-acid sequences in which the isotypes differ, in connection with the data of the Downing group for the known three-dimensional structure obtained by electron crystallography of bovine brain tubulin by Nogales et al., and applied these in molecular dynamics simulations in order to study the resulting differences in the biophysical and biochemical properties such as: volume, surface are, electric field distributions, binding sites, conformational changes, etc. Our structural experiments on purified abII, abIII and abIV tubulin dimers have produced strong evidence that their conformations differ. Using the Molecular Simulation International (MSI) Homology Software Module, we have constructed three-dimensional models of the abI, abII, abIII, abIV, abV, abVI and abVII dimers. This Downing structure was fitted to the amino acid sequences for porcine brain a- and b-tubulin, which, for the beta subunit, is largely bII. To generate models of the various dimers, the Homology software module is used to align the sequences of the various isotypes to the sequence of the Nogales et al structure, and the coordinates of the Nogales structure are mapped to the aligned beta isotype. Then energy minimization and molecular dynamic simulation is being used on the approximate result to refine a structural model of each of these dimers. Similar homology modeling approaches have been used to predict the structure of one protein from that of a closely related protein; such models have also been extensively used to design useful drugs. In constructing computational 3D models from all of the available sequences of tubulin isotypes we have exploited the high degree of sequence and structure conservation that is observed within tubulin isotypes and between the alpha and beta subunits by using software such as the experimental Modeller and tubulin crystallographic data as structural templates to produce 3D models containing chosen amino acid sequences.”

[0049] In one embodiment of the Tuszynski process, the “Swiss-Prot database” was referred to. As is also disclosed in the Tuszynski paper, “As an initial step the Swiss-Prot database Release 40.2 of 08-Nov.-2002. (available at http://www.expasy.org/sprot/]) was searched for tubulin amino acid sequences.” The article referred to a work by B. Boekmann et al. (“The SWISS-PROT protein knowledgebase and its supplement TrEMBL,” Nucl. Acids. Res. 31:365-370, 2003) for a reference relating to such “Swiss-Prot database.” It should be noted that many United States patents refer to such Swiss-Prot database. Reference may be had, e.g., to U.S. Pat. Nos. 6,183,968; 6,207,397; 6,303,319; 6,372,897; 6,373,971 (method and apparatus for pattern discovery in protein sequences); U.S. Pat. Nos. 6,387,641; 6,631,322 (methods for using functional site descriptors and predicting protein function), U.S. Pat. No. 6,466,874 (Rosetta stone method for detecting protein function and protein-protein interactions from genome sequences), U.S. Pat. No. 6,470,277 (techniques for facilitating identification of candidate genes), U.S. Pat. No. 6,564,151 (assigning protein functions by comparative genome analysis protein phylogenetic profiles), and the like. The entire disclosure of each of these United States patents is hereby incorporated by reference into this specification.

[0050] Referring again to the Tuszynksi paper, it is disclosed that: “A search using the keyword ‘tubulin’ was manually filtered to separate actual tubulin sequences from those of other tubulin related proteins. This provided some 290 sequences, representing a wide range of species. Of these 27 are annotated as being fragmentary, leaving 263 complete tubulin monomier sequences. Of particular interest were the 15 human sequences obtained . . . . ”

[0051] Referring again to the Tuszynksi paper, it is disclosed that: “Table 1 summarizes all of the tubulin sequences used in this study for quick reference and convenience. The table names the source organism, and for each . . . gives the name used in the databank. It is important to relate the biochemical data encapsulated by the amino acid sequence to the biologically relevant information presented in Table 1 in the form of the organism from which a given tubulin is derived.”

[0052] In referring to such “Table 1,” the Tuszynski paper states that: “Table 1. Tubulin sequences used in this study. The table names the source organism, and for each . . . gives the name used in the databank.”

| File Name | Name of Organism | SEQ. NO. |
|---|---|---|
| TBA1_ANEPH | Anemia phyllitidis | SEQ ID NO. 1 |
| TBA1_ARATH | Arabidopsis thaliana | SEQ ID NO. 2 |
| TBA1_CHICK | Gallus gallus | SEQ ID NO. 3 |
| TBA1_CHLRE | Chlamydomonas reinhardtii | SEQ ID NO. 4 |
| TBA1_DROME | Drosophila melanogaster | SEQ ID NO. 5 |
| TBA1_ELEIN | Eleusine indica | SEQ ID NO. 6 |
| TBA1_EMENI | Emericella nidulans | SEQ ID NO. 7 |
| TBA1_ENTHI | Entamoeba histolytica | SEQ ID NO. 8 |
| TBA1_HOMAM | Homarus americanus | SEQ ID NO. 9 |
| TBA1_HORVU | Hordeum vulgare | SEQ ID NO. 10 |
| TBA1_HUMAN | Homo sapiens | SEQ ID NO. 11 |
| TBA1_MAIZE | Zea mays | SEQ ID NO. 12 |
| TBA1_MOUSE | Mus musculus | SEQ ID NO. 13 |
| TBA1_NEUCR | Neurospora crassa | SEQ ID NO. 14 |
| TBA1_ORYSA | Oryza sativa | SEQ ID NO. 15 |
| TBA1_PARLI | Paracentrotus lividus | SEQ ID NO. 16 |
| TBA1_PEA | Pisum sativus | SEQ ID NO. 17 |
| TBA1_PELFA | Pelvetia fastigiata | SEQ ID NO. 18 |
| TBA1_PNECA | Pneumocystis carinii | SEQ ID NO. 19 |
| TBA1_SCHPO | Schizosaccharomyces pombe | SEQ ID NO. 20 |
| TBA1_STYLE | Stylonichia lemnae | SEQ ID NO. 21 |
| TBA1_VOLCA | Volvox carteri | SEQ ID NO. 22 |
| TBA1_YEAST | Saccharomyces cerevisiae | SEQ ID NO. 23 |
| TBA2_ANEPH | Anemia phyllitidis | SEQ ID NO. 24 |
| TBA2_ARATH | Arabidopsis thaliana | SEQ ID NO. 25 |
| TBA2_CAEEL | Caenorhabditis elegans | SEQ ID NO. 26 |
| TBA2_CHICK | Gallus gallus | SEQ ID NO. 27 |
| TBA2_CHLRE | Chlamydomonas reinhardtii | SEQ ID NO. 28 |
| TBA2_DROME | Drosophila melanogaster | SEQ ID NO. 29 |
| TBA2_ELEIN | Eleusine indica | SEQ ID NO. 30 |
| TBA2_EMENI | Emericella nidulans | SEQ ID NO. 31 |
| TBA2_HOMAM | Homarus americanus | SEQ ID NO. 32 |
| TBA2_HORVU | Hordeum vulgare | SEQ ID NO. 33 |
| TBA2_HUMAN | Homo sapiens | SEQ ID NO. 34 |
| TBA2_MAIZE | Zea mays | SEQ ID NO. 35 |
| TBA2_MOUSE | Mus musculus | SEQ ID NO. 36 |
| TBA2_NEUCR | Neurospora crassa | SEQ ID NO. 37 |
| TBA2PATVU | Patella vulgata | SEQ ID NO. 38 |
| TBA2_PELFA | Pelvetia fastigiata | SEQ ID NO. 39 |
| TBA2_SCHPO | Schizosaccharomyces pombe | SEQ ID NO. 40 |
| TBA2_STYLE | Stylonichia lemnae | SEQ ID NO. 41 |
| TBA3_ARATH | Arabidopsis thaliana | SEQ ID NO. 42 |
| TBA3_CHICK | Gallus gallus | SEQ ID NO. 43 |
| TBA3_DROME | Drosophila melanogaster | SEQ ID NO. 44 |
| TBA3_ELEIN | Eleusine indica | SEQ ID NO. 45 |
| TBA3_HOMAM | Homarus americanus | SEQ ID NO. 46 |
| TBA3_HORVU | Hordeum vulgare | SEQ ID NO. 47 |
| TBA3_MAIZE | Zea mays | SEQ ID NO. 48 |
| TBA3_MOUSE | Mus musculus | SEQ ID NO. 49 |
| TBA3_YEAST | Saccharomyces cerevisiae | SEQ ID NO. 50 |
| TBA4_CHICK | Gallus gallus | SEQ ID NO. 51 |
| TBA4_DROME | Drosophila melanogaster | SEQ ID NO. 52 |
| TBA4_HUMAN | Homo sapiens | SEQ ID NO. 53 |
| TBA4_MAIZE | Zea mays | SEQ ID NO. 54 |
| TBA5_CHICK | Gallus gallus | SEQ ID NO. 55 |
| TBA5_MAIZE | Zea mays | SEQ ID NO. 56 |
| TBA6_ARATH | Arabidopsis thaliana | SEQ ID NO. 57 |
| TBA6_HUMAN | Homo sapiens | SEQ ID NO. 58 |
| TBA6_MAIZE | Zea mays | SEQ ID NO. 59 |
| TBA6_MOUSE | Mus musculus | SEQ ID NO. 60 |
| TBA8_CAEEL | Caenorhabditis elegans | SEQ ID NO. 61 |
| TBA8_CHICK | Gallus gallus | SEQ ID NO. 62 |
| TBA8_HUMAN | Homo sapiens | SEQ ID NO. 63 |
| TBA8_MOUSE | Mus musculus | SEQ ID NO. 64 |
| TBA_AJECA | Ajellomyces capsulatum | SEQ ID NO. 65 |
| TBAA_PNECA | Pneumocystis carinii | SEQ ID NO. 66 |
| TBAA_SCHCO | Schizophyllum commune | SEQ ID NO. 67 |
| TBA_AVESA | Avena sativa | SEQ ID NO. 68 |
| TBA_BLEJA | Blepharisma japonicus | SEQ ID NO. 69 |
| TBA_BOMMO | Bombyx mori | SEQ ID NO. 70 |
| TBAB_SCHCO | Schizophyllum commune | SEQ ID NO. 71 |
| TBA_CANAL | Candida albicans | SEQ ID NO. 72 |
| TBA_CHLVU | Chlorella vulgaris | SEQ ID NO. 73 |
| TBA_DICDI | Dictyostelium discoideum | SEQ ID NO. 74 |
| TBAD_PHYPO | Physarum polycephalum | SEQ ID NO. 75 |
| TBAE_PHYPO | Physarum polycephalum | SEQ ID NO. 76 |
| TBA_EUGGR | Euglena gracilis | SEQ ID NO. 77 |
| TBA_EUPOC | Euplotes octocarinatus | SEQ ID NO. 78 |
| TBA_EUPVA | Euplotes vannus | SEQ ID NO. 79 |
| TBA_HAECO | Haemonchus contortus | SEQ ID NO. 80 |
| TBA_LEPSE | Leptomonas seymouri | SEQ ID NO. 81 |
| TBA_LYTPI | Lytechinus pictus | SEQ ID NO. 82 |
| TBA_MYCGR | Mycosphaerella graminicola | SEQ ID NO. 83 |
| TBA_NAEGR | Naegleria gruberi | SEQ ID NO. 84 |
| TBA_NOTVI | Notophtalamus viridescens | SEQ ID NO. 85 |
| TBAN_PHYPO | Physarum polycephalum | SEQ ID NO. 86 |
| TBA_OCTDO | Octopus Dofleini | SEQ ID NO. 87 |
| TBA_OCTVU | Lytechinus pictus | SEQ ID NO. 88 |
| TBA_ONCKE | Onchorhynchus keta | SEQ ID NO. 89 |
| TBA_OXYGR | Oxytricha granulifera | SEQ ID NO. 90 |
| TBA_PICAB | Picia abies | SEQ ID NO. 91 |
| TBA_PIG | Sus scrofa | SEQ ID NO. 92 |
| TBA_PLAFK | Plasmodium falciparum | SEQ ID NO. 93 |
| TBA_PLAYO | Plasmodium berghei yoelii | SEQ ID NO. 94 |
| TBA_PRUDU | Prunus dulcis | SEQ ID NO. 95 |
| TBA_SORMA | Sordaria macrospora | SEQ ID NO. 96 |
| TBA_TETPY | Tetrahymena pyriformis | SEQ ID NO. 97 |
| TBA_TETTH | Tetrahymena thermophila | SEQ ID NO. 98 |
| TBAT_ONCMY | Onchorhynchus mykiss | SEQ ID NO. 99 |
| TBA_TORMA | Torpedo marmorata | SEQ ID NO. 100 |
| TBA_TOXGO | Taxoplasma gondii | SEQ ID NO. 101 |
| TBA_TRYBR | Trypanosoma brucei | SEQ ID NO. 102 |
| TBA_TRYCR | Trypanosoma cruzi | SEQ ID NO. 103 |
| TBA_WHEAT | Triticum aestivum | SEQ ID NO. 104 |
| TBA_XENLA | Xenopus laevis | SEQ ID NO. 105 |
| TBB1_ANEPH | Anemia phyllitidis | SEQ ID NO. 106 |
| TBB1_ARATH | Arabidopsis thaliana | SEQ ID NO. 107 |
| TBB1_AVESA | Avena sativa | SEQ ID NO. 108 |
| TBB1_BRUPA | Brugia pahangi | SEQ ID NO. 109 |
| TBB1_CHICK | Gallus gallus | SEQ ID NO. 110 |
| TBB1_CHOCR | Chondrus crispus | SEQ ID NO. 111 |
| TBB1_COLGL | Glomerella cingulata | SEQ ID NO. 112 |
| TBB1_COLGR | Glomerella graminicola | SEQ ID NO. 113 |
| TBB1_CYAPA | Cyanaphora paradoxa | SEQ ID NO. 114 |
| TBB1_DAUCA | Daucus carota | SEQ ID NO. 115 |
| TBB1_ELEIN | Eleusine indica | SEQ ID NO. 116 |
| TBB1_EMENI | Emericella nidulans | SEQ ID NO. 117 |
| TBB1_GADMO | Gadus morhua | SEQ ID NO. 118 |
| TBB1_GEOCN | Galactomyces geotrichum | SEQ ID NO. 119 |
| TBB1_HOMAM | Homarus americanus | SEQ ID NO. 120 |
| TBB1_HUMAN | Homo sapiens | SEQ ID NO. 121 |
| TBB1_LUPAL | Lupinus albus | SEQ ID NO. 122 |
| TBB1_MAIZE | Zea mays | SEQ ID NO. 123 |
| TBB1_MANSE | Manduca sexta | SEQ ID NO. 124 |
| TBB1_NOTCO | Notothenia coriiceps | SEQ ID NO. 125 |
| TBB1_ORYSA | Oryza sativa | SEQ ID NO. 126 |
| TBB1_PARTE | Paramecium tetraurelia | SEQ ID NO. 127 |
| TBB1_PEA | Pisum sativus | SEQ ID NO. 128 |
| TBB1_PHYPO | Physarum polycephalum | SEQ ID NO. 129 |
| TBB1_PORPU | Porphyra purpura | SEQ ID NO. 130 |
| TBB1_RAT | Rattus norvegicus | SEQ ID NO. 131 |
| TBB1_SOLTU | Solanum tuberosum | SEQ ID NO. 132 |
| TBB1_SOYBN | Glycine max | SEQ ID NO. 133 |
| TBB1_TRIVI | Trichoderma viride | SEQ ID NO. 134 |
| TBB1_VOLCA | Volvox carteri | SEQ ID NO. 135 |
| TBB1_WHEAT | Triticum aestivum | SEQ ID NO. 136 |
| TBB2_ANEPH | Anemia phyllitidis | SEQ ID NO. 137 |
| TBB2_ARATH | Arabidopsis thaliana | SEQ ID NO. 138 |
| TBB2_CAEEL | Caenorhabditis elegans | SEQ ID NO. 139 |
| TBB2_CHICK | Gallus gallus | SEQ ID NO. 140 |
| TBB2_COLGL | Glomerella cingulata | SEQ ID NO. 141 |
| TBB2_COLGR | Glomerella graminicola | SEQ ID NO. 142 |
| TBB2DAUCA | Daucus carota | SEQ ID NO. 143 |
| TBB2_DROER | Drosophila erecta | SEQ ID NO. 144 |
| TBB2_DROME | Drosophila melanogaster | SEQ ID NO. 145 |
| TBB2_ELEIN | Eleusine indica | SEQ ID NO. 146 |
| TBB2_EMENI | Emericella nidulans | SEQ ID NO. 147 |
| TBB2_ERYPI | Erysiphe pisi | SEQ ID NO. 148 |
| TBB2_GEOCN | Galactomyces geotrichum | SEQ ID NO. 149 |
| TBB2_HOMAM | Homarus americanus | SEQ ID NO. 150 |
| TBB2_HUMAN | Homo sapiens | SEQ ID NO. 151 |
| TBB2_LUPAL | Solanum tuberosum | SEQ ID NO. 152 |
| TBB2_MAIZE | Zea mays | SEQ ID NO. 153 |
| TBB2_ORYSA | Oryza sativa | SEQ ID NO. 154 |
| TBB2_PEA | Pisum sativus | SEQ ID NO. 155 |
| TBB2_PHYPO | Physarum polycephalum | SEQ ID NO. 156 |
| TBB2_PORPU | Porphyra purpura | SEQ ID NO. 157 |
| TBB2_SOLTU | Solanum tuberosum | SEQ ID NO. 158 |
| TBB2_SOYBN | Glycine max | SEQ ID NO. 159 |
| TBB2_TRIVI | Trichoderma viride | SEQ ID NO. 160 |
| TBB2_WHEAT | Triticum aestivum | SEQ ID NO. 161 |
| TBB2_XENLA | Xenopus laevis | SEQ ID NO. 162 |
| TBB3_ANEPH | Anemia phyllitidis | SEQ ID NO. 163 |
| TBB3_CHICK | Gallus gallus | SEQ ID NO. 164 |
| TBB3_DROME | Drosophila melanogaster | SEQ ID NO. 165 |
| TBB3_ELEIN | Eleusine indica | SEQ ID NO. 166 |
| TBB3_MAIZE | Zea mays | SEQ ID NO. 167 |
| TBB3_ORYSA | Oryza sativa | SEQ ID NO. 168 |
| TBB3_PEA | Pisum sativus | SEQ ID NO. 169 |
| TBB3_PORPU | Porphyra purpura | SEQ ID NO. 170 |
| TBB3_SOYBN | Glycine max | SEQ ID NO. 171 |
| TBB3_WHEAT | Triticum aestivum | SEQ ID NO. 172 |
| TBB4_ARATH | Arabidopsis thaliana | SEQ ID NO. 173 |
| TBB4_CAEEL | Caenorhabditis elegans | SEQ ID NO. 174 |
| TBB4_CHICK | Gallus gallus | SEQ ID NO. 175 |
| TBB4_ELEIN | Eleusine indica | SEQ ID NO. 176 |
| TBB4_HUMAN | Homo sapiens | SEQ ID NO. 177 |
| TBB4_MAIZE | Zea mays | SEQ ID NO. 178 |
| TBB4_PORPU | Porphyra purpura | SEQ ID NO. 179 |
| TBB4_WHEAT | Triticum aestivum | SEQ ID NO. 180 |
| TBB4_XENLA | Xenopus laevis | SEQ ID NO. 181 |
| TBB5_ARATH | Arabidopsis thaliana | SEQ ID NO. 182 |
| TBB5_CHICK | Gallus gallus | SEQ ID NO. 183 |
| TBB5_ECTVR | Ectocarpus variabilis | SEQ ID NO. 184 |
| TBB5_HUMAN | Homo sapiens | SEQ ID NO. 185 |
| TBB5_MAIZE | Zea mays | SEQ ID NO. 186 |
| TBB5_WHEAT | Triticum aestivum | SEQ ID NO. 187 |
| TBB6_ARATH | Arabidopsis thaliana | SEQ ID NO. 188 |
| TBB6_CHICK | Gallus gallus | SEQ ID NO. 189 |
| TBB6_ECTVR | Ectocarpus variabilis | SEQ ID NO. 190 |
| TBB6_MAIZE | Zea mays | SEQ ID NO. 191 |
| TBB7_ARATH | Arabidopsis thaliana | SEQ ID NO. 192 |
| TBB7_CAEBR | Caenorhabditis briggsae | SEQ ID NO. 193 |
| TBB7_CAEEL | Caenorhabditis elegans | SEQ ID NO. 194 |
| TBB7_CHICK | Gallus gallus | SEQ ID NO. 195 |
| TBB7_MAIZE | Zea mays | SEQ ID NO. 196 |
| TBB8_ARATH | Arabidopsis thaliana | SEQ ID NO. 197 |
| TBB8_MAIZE | Zea mays | SEQ ID NO. 198 |
| TBB9_ARATH | Arabidopsis thaliana | SEQ ID NO. 199 |
| TBB_ACHKL | Achlya klebsiana | SEQ ID NO. 200 |
| TBB_ACRCO | Neotyphodium coenophialum | SEQ ID NO. 201 |
| TBB_AJECA | Ajellomyces capsulatum | SEQ ID NO. 202 |
| TBB_ASPFL | Aspergillus flavus | SEQ ID NO. 203 |
| TBB_ASPPA | Aspergillus parasiticus | SEQ ID NO. 204 |
| TBB_BABBO | Babesia bovis | SEQ ID NO. 205 |
| TBB_BOMMO | Bombyx mori | SEQ ID NO. 206 |
| TBB_BOTCI | Botryotinia fuckeliana | SEQ ID NO. 207 |
| TBB_CANAL | Candida albicans | SEQ ID NO. 208 |
| TBB_CEPAC | Acremonium chrysogenum | SEQ ID NO. 209 |
| TBB_CHLIN | Chlamydomonas incerta | SEQ ID NO. 210 |
| | reinhardtii | |
| TBB_CHLRE | Chlamydomonas reinhardtii | SEQ ID NO. 211 |
| TBB_CICAR | Cicer arietinum | SEQ ID NO. 212 |
| TBB_DICDI | Dictyostelium discoideum | SEQ ID NO. 213 |
| TBB_EIMTE | Eimeria tenella | SEQ ID NO. 214 |
| TBB_EPITY | Epichloe typhina | SEQ ID NO. 215 |
| TBB_ERYGR | Blumeria graminis | SEQ ID NO. 216 |
| TBB_EUGGR | Euglena gracilis | SEQ ID NO. 217 |
| TBB_EUPCR | Monoeuplotes crassus | SEQ ID NO. 218 |
| TBB_EUPFO | Euplotes focardii | SEQ ID NO. 219 |
| TBB_EUPOC | Euplotes octocarinatus | SEQ ID NO. 220 |
| TBB_GIALA | Giardia intestinalis | SEQ ID NO. 221 |
| TBB_GIBFU | Gibberella fujikuroi | SEQ ID NO. 222 |
| TBB_HALDI | Haliotis discus | SEQ ID NO. 223 |
| TBB_HORVU | Hordeum vulgare | SEQ ID NO. 224 |
| TBB_LEIME | Leishmania mexicana | SEQ ID NO. 225 |
| TBB_LYMST | Lymnae stagnalis | SEQ ID NO. 226 |
| TBB_LYTPI | Lytechinus pictus | SEQ ID NO. 227 |
| TBB_MYCPJ | Mycosphaerella pini | SEQ ID NO. 228 |
| TBB_NAEGR | Naegleria gruberi | SEQ ID NO. 229 |
| TBB_NEUCR | Neurospora crassa | SEQ ID NO. 230 |
| TBB_OCTDO | Octopus Dofleini | SEQ ID NO. 231 |
| TBB_ONCGI | Onchocerca gibsoni | SEQ ID NO. 232 |
| TBB_PARLI | Paracentrotus lividus | SEQ ID NO. 233 |
| TBB_PENDI | Penicillium digitatum | SEQ ID NO. 234 |
| TBB_PESMI | Pestalotiopsis microspora | SEQ ID NO. 235 |
| TBB_PHANO | Phaeosphaeria nodorum | SEQ ID NO. 236 |
| TBB_PHYCI | Phytophthora cinnamomi | SEQ ID NO. 237 |
| TBB_PIG | Sus scrofa | SEQ ID NO. 238 |
| TBB_PLAFA | Plasmodium falciparum | SEQ ID NO. 239 |
| TBB_PLAFK | Plasmodium falciparum | SEQ ID NO. 240 |
| TBB_PLESA | Pleurotus sajor-caju | SEQ ID NO. 241 |
| TBB_PNECA | Pneumocystis carinii | SEQ ID NO. 242 |
| TBB_POLAG | Polytomella agilis | SEQ ID NO. 243 |
| TBB_PSEAM | Pseudopleuronectes americanus | SEQ ID NO. 244 |
| TBBQ_HUMAN | Homo sapiens | SEQ ID NO. 245 |
| TBB_RHYSE | Rhynchosporium secalis | SEQ ID NO. 246 |
| TBB_SCHCO | Schizophyllum commune | SEQ ID NO. 247 |
| TBB_SCHPO | Schizosaccharomyces pombe | SEQ ID NO. 248 |
| TBB_STRPU | Strongylocentrotus purpuratus | SEQ ID NO. 249 |
| TBB_STYLE | Stylonichia lemnae | SEQ ID NO. 250 |
| TBB_TETPY | Tetrahymena pyriformis | SEQ ID NO. 251 |
| TBB_TETTH | Tetrahymena thermophila | SEQ ID NO. 252 |
| TBB_THAWE | Thalassiosira weisflogii | SEQ ID NO. 253 |
| TBB_TOXGO | Taxoplasma gondii | SEQ ID NO. 254 |
| TBB_TRYBR | Trypanosoma brucei | SEQ ID NO. 255 |
| TBB_TRYCR | Trypanosoma cruzi | SEQ ID NO. 256 |
| TBB_VENIN | Venturia inaequalis | SEQ ID NO. 257 |
| TBBX_HUMAN | Homo sapiens | SEQ ID NO. 258 |
| TBB_YEAST | Saccharomyces cerevisiae | SEQ ID NO. 259 |
| TBD_HUMAN | Homo sapiens | SEQ ID NO. 260 |
| TBE_HUMAN | Homo sapiens | SEQ ID NO. 261 |
| TBG1_HUMAN | Homo sapiens | SEQ ID NO. 262 |
| TBG1_MAIZE | Zea mays | SEQ ID NO. 263 |
| TBG1_MOUSE | Mus musculus | SEQ ID NO. 264 |
| TBG2_ARATH | Arabidopsis thaliana | SEQ ID NO. 265 |
| TBG2_DROME | Drosophila melanogaster | SEQ ID NO. 266 |
| TBG2_EUPCR | Monoeuplotes crassus | SEQ ID NO. 267 |
| TBG2_EUPOC | Euplotes octocarinatus | SEQ ID NO. 268 |
| TBG2_HUMAN | Homo sapiens | SEQ ID NO. 269 |
| TBG2_MAIZE | Zea mays | SEQ ID NO. 270 |
| TBG2_MOUSE | Mus musculus | SEQ ID NO. 271 |
| TBG2_ORYSA | Oryza sativa | SEQ ID NO. 272 |
| TBG3_MAIZE | Zea mays | SEQ ID NO. 273 |
| TBG_ANEPH | Anemia phyllitidis | SEQ ID NO. 274 |
| TBG_CAEEL | Caenorhabditis elegans | SEQ ID NO. 275 |
| TBG_CANAL | Candida albicans | SEQ ID NO. 276 |
| TBG_CHLRE | Chlamydomonas reinhardtii | SEQ ID NO. 277 |
| TBG_COCHE | Cochlioboius heterostrophus | SEQ ID NO. 278 |
| TBG_EMENI | Emericella nidulans | SEQ ID NO. 279 |
| TBG_ENTHI | Entamoeba histolytica | SEQ ID NO. 280 |
| TBG_EUPAE | Euplotes aediculatus | SEQ ID NO. 281 |
| TBG_NEUCR | Neurospora crassa | SEQ ID NO. 282 |
| TBG_PHYPA | Physcomitrella patens | SEQ ID NO. 283 |
| TBG_PLAFO | Plasmodium falciparum | SEQ ID NO. 284 |
| TBG_RETFI | Reticulomyxa filosa | SEQ ID NO. 285 |
| TBG_SCHJP | Schizosaccharomyces japonicus | SEQ ID NO. 286 |
| TBG_SCHPO | Schizosaccharomyces pombe | SEQ ID NO. 287 |
| TBG_USTVI | Microbotryum violaceum | SEQ ID NO. 288 |
| TBG_XENLA | Xenopus laevis | SEQ ID NO. 289 |
| TBG_YEAST | Saccharomyces cerevisiae | SEQ ID NO. 290 |

[0053] Referring again to the Tuszynksi paper, and in referring to “Model Construction.” the paper disclosed that: “The structures of alpha and beta tubulins are known to be quite similar, being nearly indistinguishable at 6 Angstroms . . . dispite only a 40% amino acid homology.” As support for this statement, reference is made to an article by H. Li et al., “Microtubule structure at 8 angstrom resolution,” Structure 10:1317-1328, 2002.”

[0054] Referring again to the Tuszynksi paper, it is disclosed that: “ . . . Since the sequences within an alpha or beta tubulin family are more similar to each other than to those sequences belonging to the other families of tubuins, it is reasonable to believe that any given sequence should produce a structure very similar to another member of a given family. Further support for this comes from the published structures of Nogales et al. (1998) and Lowe et al. (2001) which are of a porcine sequence, but which were fit to data from an inhomogeneous bovine sample.” The Nogales et al. reference is to an article by E. Nogales et al., “Structure of the alpha/beta tubulin dimmer by electron crystallogaraphy,” Nature 393: 199-303. The Lowe et al. reference was to an article by J. Lowe et al., “Refined structure of alpha/betal tubulin at 3.5 angstrom resolution,” Journal of Molecular Biology 313:1045-1057 (2001).

[0055] Referring again to the Tuszynksi paper, it is disclosed that: “Accordingly, by substituting appropriate amino acid side chains and properly adjusting other residues to accommodate insertions and deletions and in the sequence, crystallographic structures can be used as a framework to produce model structures with different sequences with a high degree of confidence.”

[0056] As is also disclosed in the Tuszynski et al. paper, “To build such 3D structures of the many isotypes Modeller (version 6.2) was used [Marti-Renom 2000].” The Marti-Renom reference is an article by M. A. Marti-Renom et al., “Comparative protein structure modeling of genes and genomes,” Annu. Rev. Biophys. Biomol. Struct. 29:291-325, 2000.

[0057] In the Marti-Renom paper, it is stated that the MODELLER database is disclosed at “guitar.Rockefeller.edu/modeler.html” and is discussed in an article by A. Sali et al., “Comparative protein modeling by satisfaction of spatial restraints,” J. Mol. Biol. 234:799-915, 1993.

[0058] The Modeller database is also referred to in the patent literature. Reference may be had, e.g., to U.S. Pat. Nos. 5,859,972; 5,968,782; 5,985,643; 6,225,446; 6,251,620 (three dimensional structure of a ZAP tyrosine protein kinase fragement and modeling methods), U.S. Pat. Nos. 6,391,614; 6,417,324; 6,459,996; 6,468,772; 6,495,354; 6,495,674; 6,532,437; 6,559,297; 6,605,449; 6,642,041; 6,607,902; 6,645,762; 6,569,656; 6,677,377 (structure based discovery of inhibitors of matriptase for the treatement of cancer and other conditions), U.S. Pat. No. 6,680,176; and the like. The entire disclosure of each of these United States patents is hereby incorporated by reference into this specification.

[0059] The Modeller database may be used for the “comparative protein structure modeling” that is discussed in, e.g., the Marti-Renom paper (and also in the Tuszynski paper). Such “comparative protein structure modeling” is also referred to in the patent literature. Reference may be had, e.g., to U.S. Pat. Nos. 6,462,189; 6,703,199; and 6,703,901; reference may also be had to published United States patent applications 2002/0045578 and 2004/0014944 (method and system useful for structural classification of unknown polypeptides); and reference also may be had to international patent publications WO0135255 (large scale comparative protein structure modeling); WO0234877; WO03019183 (process for the informative and iterative design of a gene-family screening library), and WO03029404. The entire disclosure of each of these United States patents, of each of these published United States patent applications, and of each of these international patent applications, is hereby incorporated in its entirety into this specification.

[0060] Referring again to the Tuszynksi paper, and to the Modeller program used therein, it is disclosed that: “To build the library of 3D tubulin structures, Modeller (version 6v2) was used . . . This program uses alignment of the sequences with known related structures, used as templates, to obtain spatial constraints that the output structure must satisfy. Additional restraints derived from statistical studies of representative protein and chemical structures are also used to ensure a physically probable result. Missing loop regions are predicuted by simulated annealing optimization of a molecular mechanics model.”

[0061] As is known to those skilled in the art, a system as large as tubulin may have many local energy minima; thus, an energy minimization program may not be sufficient to find the lowest global minimum. To seek the difference in conformation between GTP (guanosine triphosphate) and GDP (guanosine diphosphate) tubulin, applicants preferably use an annealing procedure in which the molecule is heated up well beyond physiological temperatures to induce a difference in conformation and is then slowly cooled down below physiological temperatures. The cooling process is maintained at a low enough rate so that the molecule can move between minima and find a lower energy final conformation. For a similar process that is applied by kinesin, reference may be had, e.g., to an article by W. Wriggers et al. on “Nucleotide-dependent movements of the kinesis motor domain predicted by simulated annealing,” Biophys. J., 75:646-661, August, 1998.

[0062] In one embodiment of the process of this invention, the TINKER molecular simulation software is used. This software package is described, e.g., in an article by M. J. Dudek et al. on the “Accurate modeling of the intramolecular electrostatic energy of proteins,” J. Comput. Chem, 16:791-816, 1995. This TINKER software is also described in, e.g., U.S. Pat. Nos. 5,049,390; 6,180,612; 6,531,306; 6,537,791; and 6,573,060. The entire disclosure of each of these United States patents is hereby incorporated by reference into this specification.

[0063] In one embodiment, the TINKER anneal program is preferably used to heat up the proteins from 1 degree Kelvin to 400 degrees Kelvin and then cool them very slowly to 200 degrees Kelvin.

[0064] In one embodiment, the anneal program is used to heat up the proteins from a temperature of from about 1 to about 299 degrees Kelvin to a temperature within the range of from about 300 to about 500 degrees Kelvin linearly over a period of from about 100 to about 100,000 picoseconds, preferably, over a period of at least about 200 picoseconds.

[0065] Referring again to the Tuszynksi paper, it is disclosed therein that “Since the 3D structures of tubulin lack the extreme C-termini of the proteins, we used this capability to create structure files that include the C-terminal amino acids by including those portions of the sequence in the Modeller input.” In the process of this invention, the tubulin with its C-terminii, “tubulin-C,” may be generated by adding the missing residues onto the alpha band beta-tubulin. Thus, e.g., one may use the “MOLMOL” software to add the “missing residues.” See, e.g., an article by R. Koradi, “MOLMOL: a program for display and analysis of macromolecular structures,” J. Mol. Graphics, 14:51-55, 1996. Reference also may be had, e.g., to U.S. Pat. No. 6,077,682 (method of identifying inhibitors of sensor histidine kinases through rational drug design); U.S. Pat. Nos. 6,162,627; 6,171,804 (method of determining interdomain orientation and changes of interdomain orientation on ligaton), U.S. Pat. No. 6,723,697; and the like. The entire disclosure of each of these United States patents is hereby incorporated by reference into this specification.

[0066] In the process described in the Tuszynski paper, the missing residues were added by the Modeller software, and the “tubulin-C model” was then subjected to an energy minimization program. As is known to those skilled in the art, in an energy minimization program, one searches for the minimum energy configuration of a molecule by moving down a gradient through configuration space (see W. F. van Gusteren et al., “Computer simulation of molecular dynamics: Methodoly, applications and perspectives in chemistry,” Angew. Chem. Int. Ed. Engl., 29-992-1023,1990. Reference also may be had, e.g., to U.S. Pat. No. 5,453,937 (method and system for protein modeling); U.S. Pat. No. 5,557,535 (method and system for protein modeling); U.S. Pat. No. 5,884,230 (method and system for protein modeling); U.S. Pat. No. 6,188,965 (apparatus and method for automated protein design); U.S. Pat. No. 6,269,312 (apparatus ad method for automated protein design); U.S. Pat. Nos. 6,376,504; 6,380,190; 6,403,312 (protein design authoamtic for protein libraries); U.S. Pat. Nos. 6,514,729; 6,545,152; 6,682,923; 6,689,793; 6,708,120 (apparatus and method for automated protein design); U.S. Pat. Nos. 6,746,853; 6,750,325; and the like. The entire disclosure of each of these United States patents is hereby incorporated by reference into this specification.

[0067] Referring again to the Tuszynski paper, it is disclosed that: “For our work we used five structures from the tubulin family as templates. One of these from PDB file 1FSZ (Lowe and Amos, 1998) is the crystal structure of FtsZ, a putative prokaryontic homolog of tublin Erickson (1997).” The Lowe and Amos reference is an article by J. Lowe et al., “Crystal Structure of the bacterial cell-division protein FtsZ,” Nature, 393:203-206,1998. The Erickson reference is an article by H. P. Erickson, “FtsZ, a tubulin homologue, in prokaryote cell division,” Trends Cell Biol., 7:362-367, 1997.Reference also may be had, e.g., to U.S. Pat. No. 6,350,866, the entire disclosure of which is hereby incorporated by reference in to this specification.

[0068] Another two of the tubulin templates described in the Tuszynski paper were described as being “Two more structures (and alpha- and a beta-monomer) came from 1TUB (Nogales et al., 1998), the original tubulin crystal . . . ” The Nogales et al. reference is E. S. Nogales et al., “Structure of the alpha/beta tubulion dimmer by electron crystallography,” Nature 393:199-203, 1998.

[0069] Yet another two of the tubulin templates described in the Tuszynski paper were “ . . . two more from 1JFF (Lowe et al. 2001), a more refined version of the same structure.” The Lowe et al. reference is an article by J. H. Lowe et al. on “Refined structure of alpha/beta tubulin at 3.5 angstrom resolution,” Journal of Molecular Biology, 313:1045-1057, 2001.

[0070] As is also disclosed in the Tuszynski et al. paper, “With the resulting library of structural tubulin models, various computational estimates of physical properties of the different tubulins may be made. These include the volume, surface area, net charge, and dipole moments. We performed these calculations on the model structures, typically using analysis tools within the Gromacs (Lindahl et al., 2001) molecular dynamics package (version 3.1.4). . . . ” The Lindahl et al. reference was an article by E. B. Lindahl et al. entitled “GROMACS 3.0: A package for molecular simulation and trajectory analysis,” J. Mol. Mod., 7:306-317, 2001. Reference also may be had, e.g., to published United States patent applications 2003/0082521, 2003/0108957, 2003/0187626 (method for providing thermal excitation to molecular dynamics models), and 2003/0229456 (methods for pedicting properties of molecules). The entire disclosure of each of these published patent applications is hereby incorporated by reference into this specification.

[0071] As is also disclosed in the Tuszynski article, “We also analyzed the properties of the C-terminal projection. We first needed to define this region. We used Clustal W (version 1.82) (Thompson et al., 1994) in order to obtain a multiple sequence alignment amongst the peptides. The multiple alignment then allows rapid identification of corresponding residues in all of the sequences.” The Thompson et al. reference is an article by J. D. Thompson et al. on “CLUSTAL W: Improving the sensitivity of progressive multiple sequence alignment through sequence weighting, positions-specific gap penalties and weight matrix choice,” Nucleic Acids Research, 22:4673-4680, 1994. Reference also may be had, e.g., to U.S. Pat. Nos. 6,403,558; 6,451,548; 6,465,431; 6,489,537; 6,559,294; 6,582,950; 6,632,621; 6,653,283; 6,586,401; 6,589,936; 6,734,283; and the like. The entire disclosure of each of these United States patents is hereby incorporated by reference into this specification.

[0072] As is also disclosed in the Tuszynski paper, “Other interesting properties of tubulin are inherent to dimers. In order to create a set of dimers for study we fit an alpha-monomer and a beta-monomer to their corresponding monomers in the 1JFF structure. This was done by rotation and translation of the Modeller structures in order to minimize the RMSD between a set of alpha-carbons from residues present in all the sequences. This procedure does not prevent steric conflicts between the two monomers and can create dimers with overlaps. However, for some types of calculations such as estimates of multipiole components, this will not prevent reasonable results. A set of over 200 dimers was obtained in this way by constructing all the alpha-beta pairs that share a common species identifier in the Swiss-Prot name. This restricts the number of dimers to a manageable set and voids hybrids such as a carrot/chicken crossing that would not occur naturally.”

[0073] As is also disclosed in the Tuszynski paper, “The library of tubulin structures . . . were analyzed by molecular mechanics to determine their net charges, dipole moment components, dipole orientations, volumes, surface areas and the lengths and charges of their C-termini. The results of our computatations in this regard are shown in Table 2.” The Table 1 below contains the data presented in the Table 2 of the article.

TABLE 1
TABLE 1

| | | | | | Net | Volume | |
|---|---|---|---|---|---|---|---|
| Name | <M_x> | <M_y> | <M_z> | <IMI> | Chg | A\hat{ }3 | Area A\hat{ }2 |
| TBA1_ANEPH | −3.02E+02 | −6.06E+02 | 1.16E+03 | 1.34E+03 | −22 | 43722.51 | 46119.66 |
| TBA1_ARATH | 5.03E+01 | −4.69E+02 | 1.50E+03 | 1.57E+03 | −24 | 43725.6 | 46097.33 |
| TBA1_CHICK | −2.84E+02 | −9.75E+02 | 1.61E+003 | 1.90E+03 | −21 | 40489.52 | 43082.05F |
| TBA1_CHLRE | −6.10E+01 | −7.44E+02 | 7.28E+02 | 1.04E+03 | −21 | 43642.98 | 45933.57 |
| TBA1_DROME | 5.95E+01 | −6.29E+02 | 1.05E+03 | 1.23E+03 | −22 | 44030.65 | 46824.19 |
| TBA1_ELEIN | −5.54E+01 | −3.29E+02 | 1.37E+03 | 1.41E+003 | −24 | 43860.52 | 46749.02 |
| TBA1_EMENI | −1.86E+02 | −1.23E+03 | 7.71E+002 | 1.47E+03 | −24 | 44069.69 | 46434.2 |
| TBA1_ENTHI | 2.50E+02 | −6.70E+02 | 1.46E+02 | 7.30E+02 | −10 | 44061.3 | 46460.88 |
| TBA1_HOMAM | −1.53E+02 | −1.15E+03 | 9.52E+02 | 1.50E+03 | −22 | 44167.33 | 46824.48 |
| TBA1_HORVU | 1.55E+02 | −3.40E+02 | 1.27E+03 | 1.32E+03 | −23 | 43590.96 | 45826.84 |
| TBA1_HUMAN | −4.67E+02 | −8.10E+02 | 1.11E+03 | 1.45E+03 | −24 | 44250.31 | 47173.96 |
| TBA1_MAIZE | 1.03E+02 | −3.28E+02 | 1.28E+03 | 1.32E+03 | −24 | 43834.72 | 46651.62 |
| TBA1_MOUSE | −3.33E+02 | −1.21E+03 | 7.70E+02 | 1.47E+03 | −24 | 44263.22 | 47101.9 |
| TBA1_NEUCR | 4.87E+01 | −6.76E+02 | 6.94E+02 | 9.70E+02 | −19 | 44052.23 | 46358.29 |
| TBA1_ORYSA | −2.19E+02 | −1.16E+03 | 1.12E+03 | 1.62E+03 | −24 | 43648.39 | 45939.87 |
| TBA1_PARLI | 2.71E+002 | −1.19E+03 | 1.78E+03 | 2.16E+03 | −25 | 44183.57 | 46803.97 |
| TBA1_PEA | −3.23E+02 | −7.69E+02 | 1.05E+03 | 1.34E+03 | −23 | 43567.64 | 45723.58 |
| TBA1_PELFA | −4.01E+002 | −1.41E+003 | 8.27E+002 | 1.68E+003 | −24 | 43906.79 | 46567.68 |
| TBA1_PNECA | −2.57E+001 | −9.24E+002 | 9.87E+002 | 1.35E+003 | −20 | 44334.85 | 47012.18 |
| TBA1_SCHPO | −2.56E+000 | −1.26E+003 | 6.43E+002 | 1.41E+003 | −22 | 44895.34 | 47968.48 |
| TBA1_STYLE | −2.03E+002 | −1.27E+003 | 8.29E+002 | 1.53E+003 | −23 | 43243.03 | 45451.26 |
| TBA1_VOLCA | −1.26E+002 | −8.00E+002 | 6.88E+002 | 1.06E+003 | −21 | 43630.21 | 45981.34 |
| TBA1_YEAST | −1.90E+002 | −9.79E+002 | 4.23E+002 | 1.08E+003 | −22 | 43873.76 | 46461.59 |
| TBA2_ANEPH | −2.78E+002 | −8.85E+002 | 1.35E+003 | 1.64E+003 | −15 | 35461.49 | 37487.42F |
| TBA2_ARATH | −1.18E+002 | −6.40E+002 | 1.50E+003 | 1.63E+003 | −23 | 43766.11 | 46803.45 |
| TBA2_CAEEL | −1.39E+002 | −8.51E+002 | 1.07E+003 | 1.37E+003 | −22 | 43890.89 | 46319.2 |
| TBA2_CHICK | −9.83E+001 | −2.00E+002 | 1.12E+003 | 1.14E+003 | −25 | 43774.22 | 46365.41 |
| TBA2_CHLRE | −1.41E+002 | −8.09E+002 | 7.99E+002 | 1.15E+003 | −22 | 43601.27 | 45660.58 |
| TBA2_DROME | −9.25E+001 | −1.09E+003 | 7.03E+002 | 1.30E+003 | −21 | 44116.52 | 46892.4 |
| TBA2_ELEIN | 3.81E+001 | −3.80E+002 | 1.39E+003 | 1.44E+003 | −21 | 43843.11 | 45940.56 |
| TBA2_EMENI | −3.11E+002 | −1.41E+003 | 6.14E+002 | 1.57E+003 | −21 | 44173.08 | 46890.29 |
| TBA2_HOMAM | −7.38E+002 | −6.68E+002 | 9.66E+002 | 1.39E+003 | −20 | 44252.35 | 47078.27 |
| TBA2_HORVU | −1.24E+002 | −5.45E+002 | 1.44E+003 | 1.54E+003 | −24 | 43705.55 | 46254.23 |
| TBA2_HUMAN | −7.89E+001 | −1.27E+003 | 7.92E+002 | 1.49E+003 | −23 | 44045.61 | 46631.11 |
| TBA2_MAIZE | 3.87E+001 | −3.08E+002 | 1.32E+003 | 1.35E+003 | −24 | 43670.06 | 46059.53 |
| TBA2_MOUSE | −4.62E+002 | −1.26E+003 | 7.32E+002 | 1.53E+003 | −24 | 44188.6 | 46902.07 |
| TBA2_NEUCR | −4.64E+002 | −8.59E+002 | 6.78E+002 | 1.19E+003 | −22 | 43969.77 | 46397.94 |
| TBA2PATVU | −7.08E+002 | −1.23E+003 | 9.86E+002 | 1.73E+003 | −24 | 44205.67 | 46802.41 |
| TBA2_PELFA | −5.63E+002 | −1.35E+003 | 1.09E+003 | 1.82E+003 | −25 | 43972.36 | 46729.96 |
| TBA2_SCHPO | −3.69E+002 | −6.06E+002 | 7.84E+002 | 1.06E+003 | −23 | 44413.68 | 47084.43 |
| TBA2_STYLE | −1.52E+002 | −1.20E+003 | 1.42E+003 | 1.87E+003 | −21 | 43462.96 | 45794.68 |
| TBA3_ARATH | −1.37E+002 | −6.23E+002 | 1.31E+003 | 1.45E+003 | −23 | 43767.64 | 46340.56 |
| TBA3_CHICK | 9.52E+001 | −1.35E+003 | 4.35E+002 | 1.42E+003 | −11 | 31862.21 | 34076.89F |
| TBA3_DROME | 8.39E+001 | −5.89E+002 | 9.56E+002 | 1.13E+003 | −22 | 44025.38 | 46744.36 |
| TBA3_ELEIN | −2.23E+002 | −1.06E+003 | 7.94E+002 | 1.34E+003 | −24 | 43622.68 | 45927.05 |
| TBA3_HOMAM | −4.66E+002 | −1.35E+003 | 9.96E+002 | 1.74E+003 | −24 | 44023.88 | 46424.8 |
| TBA3_HORVU | 1.67E+002 | −2.61E+002 | 1.19E+003 | 1.23E+003 | −24 | 43774.25 | 46614.74 |
| TBA3_MAIZE | −2.26E+002 | −9.73E+002 | 1.25E+003 | 1.60E+003 | −20 | 43523.21 | 45861.11 |
| TBA3_MOUSE | −7.89E+001 | −1.27E+003 | 7.92E+002 | 1.49E+003 | −23 | 44045.61 | 46631.11 |
| TBA3_YEAST | −3.29E+001 | −1.38E+003 | 7.81E+001 | 1.38E+003 | −20 | 43772.88 | 46394.31 |
| TBA4_CHICK | −7.55E+001 | −1.23E+003 | 1.34E+003 | 1.82E+003 | −19 | 31763.1 | 34085.01F |
| TBA4_DROME | −4.56E+002 | −9.92E+002 | 8.14E+002 | 1.36E+003 | −18 | 44749.62 | 46802.21 |
| TBA4_HUMAN | −4.56E+001 | −7.37E+002 | 1.29E+003 | 1.49E+003 | −24 | 44006.12 | 46802.17 |
| TBA4_MAIZE | 1.91E+002 | 5.47E+002 | 5.31E+002 | 7.86E+002 | −13 | 5653.1 | 6441.79F |
| TBA5_CHICK | −5.61E+002 | −8.51E+002 | 9.93E+002 | 1.42E+003 | −24 | 44001.41 | 46787.46 |
| TBA5_MAIZE | 1.18E+002 | −3.59E+002 | 1.20E+003 | 1.26E+003 | −24 | 43664.32 | 46180.91 |
| TBA6_ARATH | −4.74E+002 | −9.38E+002 | 1.03E+003 | 1.47E+003 | −23 | 43549.12 | 45981.06 |
| TBA6_HUMAN | −1.51E+002 | −8.12E+002 | 9.12E+002 | 1.23E+003 | −23 | 44019.72 | 46935.74 |
| TBA6_MAIZE | 1.05E+002 | −2.29E+002 | 1.28E+003 | 1.30E+003 | −24 | 43616.26 | 45962.24 |
| TBA6_MOUSE | −4.97E+002 | −8.04E+002 | 8.36E+002 | 1.26E+003 | −23 | 44005.43 | 46878.15 |
| TBA8_CAEEL | 4.38E+001 | −1.35E+003 | 6.07E+002 | 1.48E+003 | −21 | 44092.19 | 46452.13 |
| TBA8_CHICK | −3.14E+002 | −1.21E+003 | 6.74E+002 | 1.42E+003 | −17 | 31941.5 | 34147.91F |
| TBA8_HUMAN | −2.56E+002 | −1.13E+003 | 6.47E+002 | 1.33E+003 | −24 | 44108.74 | 46846.78 |
| TBA8_MOUSE | 2.58E+001 | −9.76E+002 | 5.25E+002 | 1.11E+003 | −23 | 44094.24 | 46772.18 |
| TBA_AJECA | 4.11E+002 | −5.71E+002 | −3.80E+002 | 8.00E+002 | −11 | 40915.67 | 42810.21F |
| TBAA_PNECA | 4.02E+002 | −4.58E+002 | −3.47E+002 | 7.01E+002 | 0 | 21163.74 | 22925.51F |
| TBAA_SCHCO | 6.78E+000 | −9.52E+002 | 6.63E+002 | 1.16E+003 | −20 | 43528.88 | 46457.95 |
| TBA_AVESA | 4.40E+002 | −3.62E+002 | 3.57E+002 | 6.72E+002 | −17 | 43193.08 | 45318.02 |
| TBA_BLEJA | −1.14E+002 | 4.91E+001 | 5.37E+001 | 1.35E+002 | −17 | 4939.05 | 5726.72F |
| TBA_BOMMO | −1.56E+002 | −1.02E+003 | 5.91E+002 | 1.19E+003 | −23 | 44002.66 | 46587.95 |
| TBAB_SCHCO | 1.68E+002 | −8.87E+002 | 1.06E+003 | 1.39E+003 | −17 | 43480.44 | 46447.1 |
| TBA_CANAL | −2.94E+002 | −1.58E+003 | 1.45E+002 | 1.61E+003 | −20 | 43827.47 | 46383.14 |
| TBA_CHLVU | −3.40E+002 | −1.04E+003 | 6.60E+002 | 1.28E+003 | −23 | 43800.27 | 46511.59 |
| TBA_DICDI | −2.65E+002 | −8.18E+002 | 4.88E+002 | 9.88E+002 | −15 | 44897.67 | 47487.03 |
| TBAD_PHYPO | 7.24E+001 | −8.54E+002 | 1.25E+003 | 1.51E+003 | −22 | 43832.96 | 46203.15 |
| TBAE_PHYPO | 5.38E+001 | −8.04E+002 | 9.48E+002 | 1.24E+003 | −22 | 43712.79 | 46164.96 |
| TBA_EUGGR | −5.50E+002 | −9.02E+002 | 7.55E+002 | 1.30E+003 | −23 | 44007.88 | 46521.52 |
| TBA_EU POC | 3.58E+000 | −8.90E+002 | 8.98E+002 | 1.26E+003 | −22 | 43646.63 | 46268.82 |
| TBA_EU PVA | −3.61E+002 | −9.45E+002 | 6.25E+002 | 1.19E+003 | −22 | 43678.31 | 46191.85 |
| TBA_HAECO | −5.01E+002 | −9.24E+002 | 1.01E+003 | 1.45E+003 | −23 | 44184.78 | 46867.6 |
| TBA_LEPSE | 0 | | | | | 2420.34 | 2750.51F |
| TBA_LYTPI | −8.32E+002 | −1.07E+003 | 1.57E+003 | 2.07E+003 | −11 | 15959.86 | 17858.74 |
| TBA_MYCGR | 1.31E+001 | −1.13E+003 | 8.25E+001 | 1.13E+003 | −24 | 43927.86 | 46753.33 |
| TBA_NAEGR | −4.44E+002 | −1.04E+003 | 3.75E+002 | 1.19E+003 | −23 | 44031.56 | 47036.09 |
| TBA_NOTVI | −1.47E+002 | −8.20E+002 | 1.11E+003 | 1.39E+003 | −24 | 44167.23 | 47197.14 |
| TBAN_PHYPO | −1.15E+002 | −9.60E+002 | 8.97E+002 | 1.32E+003 | −23 | 43607.45 | 45977.08 |
| TBA_OCTDO | −1.92E+002 | −1.38E+003 | 1.19E+003 | 1.84E+003 | −22 | 44189.74 | 46624.65 |
| TBA_OCTVU | −3.40E+002 | −1.21E+003 | 1.28E+003 | 1.79E+003 | −12 | 23897.38 | 25881.13F |
| TBA_ONCKE | −1.99E+002 | −1.15E+003 | 1.11E+003 | 1.61E+003 | −24 | 43491.82 | 46581.51 |
| TBA_OXYGR | −8.66E+001 | −1.08E+003 | 8.99E+002 | 1.41E+003 | −23 | 43713.34 | 46373.82 |
| TBA_PICAB | −1.02E+002 | −9.19E+001 | −1.23E+002 | 1.84E+002 | −10 | 11088.01 | 12137.53F |
| TBA_PIG | −4.06E+002 | −1.20E+003 | 6.32E+002 | 1.42E+003 | −25 | 44083.31 | 46762.84 |
| TBA_PLAFK | −6.63E+002 | −1.02E+003 | 1.09E+003 | 1.64E+003 | −22 | 44159.95 | 46868.83 |
| TBA_PLAYO | −4.57E+002 | −9.08E+002 | 9.83E+002 | 1.41E+003 | −12 | 19399.72 | 20787.14F |
| TBA_PRUDU | −2.93E+002 | −1.09E+003 | 7.65E+002 | 1.36E+003 | −23 | 43611.95 | 46257.89 |
| TBA_SORMA | −5.77E+001 | −5.78E+002 | 8.84E+002 | 1.06E+003 | −23 | 43781.31 | 46691.13 |
| TBA_TETPY | 1.49E+002 | −8.36E+002 | 8.32E+002 | 1.19E+003 | −21 | 43728.45 | 46142.49 |
| TBA_TETTH | −5.13E+001 | −7.26E+002 | 8.46E+002 | 1.12E+003 | −21 | 43757.64 | 46334.88 |
| TBAT_ONCMY | −1.81E+002 | −1.07E+003 | 8.98E+002 | 1.41E+003 | −23 | 44043.36 | 46640.52 |
| TBA_TORMA | −2.02E+002 | −1.15E+003 | 6.45E+002 | 1.33E+003 | −24 | 44318.53 | 47358.43 |
| TBA_TOXGO | 2.03E+002 | −1.08E+003 | 1.11E+003 | 1.56E+003 | −23 | 44098.44 | 46708.74 |
| TBATRYBR | −1.72E+002 | −1.00E+003 | 8.63E+002 | 1.33E+003 | −24 | 43867.8 | 46476.58 |
| TBA_TRYCR | −3.14E+002 | −1.05E+003 | 9.14E+002 | 1.42E+003 | −25 | 43758.17 | 46172.03 |
| TBA_WHEAT | 2.00E+002 | −6.80E+002 | 1.39E+003 | 1.56E+003 | −24 | 43805.34 | 46562.2 |
| TBA_XENLA | −2.31E+002 | −1.10E+003 | 6.83E+002 | 1.31E+003 | −23 | 43943 | 46478.64 |
| TBB1_ANEPH | −2.40E+002 | −6.68E+002 | 1.53E+003 | 1.69E+003 | −21 | 43331.36 | 45949.82F |
| TBB1_ARATH | −1.22E+003 | −1.02E+003 | 2.69E+003 | 3.13E+003 | −27 | 43751.93 | 46146.83 |
| TBB1_AVESA | −8.00E+002 | −1.71E+003 | 2.56E+003 | 3.18E+003 | −25 | 38101.3 | 41156.74 |
| TBB1_BRUPA | −2.70E+002 | −6.98E+002 | 1.81E+003 | 1.96E+003 | −26 | 43981.4 | 46705.33 |
| TBB1_CHICK | −1.13E+003 | −1.02E+003 | 1.51E+003 | 2.15E+003 | −25 | 43815.13 | 46865.04 |
| TBB1_CHOCR | −6.25E+002 | 2.36E+002 | 1.77E+003 | 1.89E+003 | −27 | 43977.7 | 45918.5 |
| TBB1_COLGL | −1.39E+003 | −1.22E+003 | 3.07E+003 | 3.58E+003 | −24 | 43616.55 | 45527.47 |
| TBB1_COLGR | −2.58E+002 | −6.84E+002 | 2.23E+003 | 2.35E+003 | −24 | 43341.08 | 45417.82 |
| TBB1_CYAPA | −1.03E+003 | −1.03E+003 | 1.46E+003 | 2.06E+003 | −25 | 43703.53 | 46639.47 |
| TBB1_DAUCA | −1.29E+003 | −4.57E+002 | 2.76E+003 | 3.08E+003 | −17 | 31337.94 | 33360.35 |
| TBB1_ELEIN | −1.10E+003 | −1.03E+003 | 2.71E+003 | 3.10E+003 | −26 | 43749.89 | 46609.62 |
| TBB1_EMENI | −3.24E+002 | −1.74E+003 | 1.74E+003 | 2.48E+003 | −23 | 43750.84 | 46675.24 |
| TBB1_GADMO | −1.02E+003 | −1.16E+003 | 1.20E+003 | 1.95E+003 | −25 | 43817.93 | 47122.12 |
| TBB1_GEOCN | −9.55E+002 | −9.87E+002 | 1.33E+003 | 1.91E+003 | −24 | 43808.6 | 46274.2 |
| TBB1_HOMAM | −1.24E+003 | −1.24E+003 | 2.66E+003 | 3.19E+003 | −24 | 44266.15 | 45948.21 |
| TBB1_HUMAN | −4.95E+002 | −1.36E+003 | 2.04E+003 | 2.50E+003 | −25 | 43765.02 | 46853.55 |
| TBB1_LUPAL | −1.56E+003 | −1.20E+003 | 2.93E+003 | 3.53E+003 | −25 | 43898.24 | 46734.22 |
| TBB1_MAIZE | −8.98E+002 | −1.44E+003 | 2.28E+003 | 2.84E+003 | −25 | 43776.83 | 46781.39 |
| TBB1_MANSE | 3.26E+001 | −4.73E+002 | 1.77E+003 | 1.83E+003 | −25 | 44083.08 | 46838.17 |
| TBB1_NOTCO | −9.76E+002 | −1.32E+003 | 2.51E+003 | 3.00E+003 | −25 | 43698.37 | 46442.69 |
| TBB1_ORYSA | −1.04E+003 | −1.14E+003 | 1.59E+003 | 2.22E+003 | −25 | 43757.44 | 46832.09 |
| TBB1_PARTE | −1.64E+002 | −1.30E+003 | 1.62E+003 | 2.08E+003 | −24 | 43491.13 | 46266.33 |
| TBB1_PEA | −1.68E+003 | −1.21E+003 | 3.14E+003 | 3.76E+003 | −26 | 44208.97 | 46988.05F |
| TBB1_PHYPO | −2.55E+002 | −9.30E+002 | 1.51E+003 | 1.79E+003 | −23 | | |
| TBB1_PORPU | −9.28E+002 | −9.18E+002 | 2.05E+003 | 2.43E+003 | −28 | 43887.44 | 47046.49F |
| TBB1_RAT | −1.24E+003 | −1.25E+003 | 2.47E+003 | 3.04E+003 | −25 | 43855.58 | 46823.88 |
| TBB1_SOLTU | −1.31E+003 | −1.08E+003 | 3.00E+003 | 3.45E+003 | −26 | 43921.08 | 45964.17 |
| TBB1_SOYBN | −1.99E+002 | −1.02E+003 | 1.77E+003 | 2.06E+003 | −22 | 43716.86 | 46392.04 |
| TBB1_TRIVI | −2.09E+002 | −1.21E+003 | 1.46E+003 | 1.91E+003 | −21 | 43239.19 | 45386.6 |
| TBB1_VOLCA | −5.67E+002 | −1.31E+003 | 1.89E+003 | 2.37E+003 | −24 | 43622.7 | 46596.3 |
| TBB1_WHEAT | −8.62E+002 | −8.33E+002 | 2.00E+003 | 2.33E+003 | −25 | 44053.19 | 47377.04 |
| TBB2_ANEPH | −2.34E+002 | −1.01E+003 | 1.48E+003 | 1.81E+003 | −18 | 40451.27 | 43579.53 |
| TBB2_ARATH | −1.86E+003 | −8.40E+002 | 3.47E+003 | 4.03E+003 | −27 | 44380.25 | 47532.89 |
| TBB2_CAEEL | −1.22E+003 | −1.30E+003 | 2.60E+003 | 3.15E+003 | −24 | 44042.41 | 46516.26 |
| TBB2_CHICK | −9.85E+002 | −1.18E+003 | 2.51E+003 | 2.94E+003 | −24 | 43790.78 | 46641.57 |
| TBB2_COLGL | 4.51E+001 | −1.25E+003 | 2.44E+003 | 2.74E+003 | −24 | 43772.28 | 46801.36 |
| TBB2_COLGR | −6.48E+002 | −1.73E+003 | 2.32E+003 | 2.96E+003 | −24 | 43776.26 | 46725.65 |
| TBB2DAUCA | −3.80E+002 | −1.04E+003 | 1.48E+003 | 1.85E+003 | −25 | 43469.26 | 46734.07 |
| TBB2_DROER | −1.53E+003 | −1.19E+003 | 3.02E+003 | 3.59E+003 | −25 | 43757.19 | 46469.02 |
| TBB2_DROME | −1.08E+003 | −1.15E+003 | 2.59E+003 | 3.03E+003 | −26 | 43646.93 | 46257.22 |
| TBB2_ELEIN | −5.42E+002 | −6.38E+002 | 2.37E+003 | 2.52E+003 | −26 | 44115.31 | 47287.17 |
| TBB2_EMENI | −3.49E+002 | −1.26E+003 | 2.11E+003 | 2.48E+003 | −22 | 43740.18 | 46549.31 |
| TBB2_ERYPI | −1.03E+003 | −1.43E+003 | 1.94E+003 | 2.62E+003 | −22 | 43844.47 | 46799.54 |
| TBB2_GEOCN | −1.16E+003 | −5.41E+002 | 2.71E+003 | 3.00E+003 | −28 | 44192.98 | 46317.34 |
| TBB2_HOMAM | −4.43E+002 | −9.20E+001 | 2.03E+003 | 2.08E+003 | −24 | 44467.04 | 45943.42 |
| TBB2_HUMAN | −1.83E+002 | −1.53E+003 | 1.72E+003 | 2.31E+003 | −25 | 43874.46 | 47063.85 |
| TBB2_LUPAL | −1.68E+003 | −1.16E+003 | 3.46E+003 | 4.02E+003 | −26 | 44006.64 | 46759.35 |
| TBB2_MAIZE | −9.72E+002 | −1.25E+003 | 2.49E+003 | 2.95E+003 | −23 | 43627.92 | 46573.3 |
| TBB2_ORYSA | −7.82E+002 | −1.02E+003 | 1.61E+003 | 2.06E+003 | −25 | 44025.13 | 47076.73 |
| TBB2_PEA | −1.87E+003 | −1.43E+003 | 2.80E+003 | 3.66E+003 | −28 | 44119.64 | 47264.21 |
| TBB2_PHYPO | −1.62E+003 | −9.87E+002 | 3.29E+003 | 3.80E+003 | −24 | 44197.53 | 47050.16 |
| TBB2_PORPU | −8.84E+002 | −5.18E+002 | 1.80E+003 | 2.07E+003 | −27 | 41546.31 | 44676.99 |
| TBB2_SOLTU | −9.18E+002 | −1.31E+003 | 2.27E+003 | 2.78E+003 | −26 | 44046.81 | 46135.05 |
| TBB2_SOYBN | −1.21E+003 | −1.42E+003 | 2.75E+003 | 3.32E+003 | −26 | 44355.5 | 47559.1 |
| TBB2_TRIVI | −5.10E+002 | −9.99E+002 | 2.41E+003 | 2.66E+003 | −24 | 43739.12 | 46059.81 |
| TBB2_WHEAT | −1.29E+003 | −8.96E+002 | 3.24E+003 | 3.61E+003 | −27 | 43864.6 | 46565.28 |
| TBB2_XENLA | −8.81E+002 | −8.68E+002 | 1.96E+003 | 2.32E+003 | −24 | 43639.84 | 46526.04 |
| TBB3_ANEPH | −7.63E+002 | −8.82E+002 | 1.87E+003 | 2.20E+003 | −9 | 24028.31 | 25945.03F |
| TBB3_CHICK | −1.48E+003 | −1.08E+003 | 3.01E+003 | 3.52E+003 | −26 | 43756.1 | 46490.85 |
| TBB3_DROME | −1.29E+003 | −1.65E+003 | 2.45E+003 | 3.22E+003 | −23 | 44396.18 | 46320.02 |
| TBB3_ELEIN | −1.51E+003 | −1.19E+003 | 2.31E+003 | 3.00E+003 | −27 | 43974.3 | 47141.63 |
| TBB3_MAIZE | −1.40E+003 | −1.05E+003 | 2.84E+003 | 3.34E+003 | −25 | 43485.86 | 46040.71 |
| TBB3_ORYSA | −1.39E+003 | −9.58E+002 | 2.79E+003 | 3.26E+003 | −27 | 43797.24 | 46373.71 |
| TBB3_PEA | −1.46E+003 | −1.53E+003 | 2.81E+003 | 3.52E+003 | −27 | 43323.16 | 46648.94F |
| TBB3_PORPU | −1.17E+003 | −1.14E+003 | 2.60E+003 | 3.07E+003 | −26 | 43529.91 | 46185.14 |
| TBB3_SOYBN | 4.79E+002 | −1.01E+003 | −2.15E+002 | 1.14E+003 | −9 | 40339.02 | 43199.08F |
| TBB3_WHEAT | −1.42E+003 | −1.03E+003 | 3.02E+003 | 3.49E+003 | −28 | 43670.95 | 46343.03 |
| TBB4_ARATH | −1.06E+003 | −1.21E+003 | 2.38E+003 | 2.87E+003 | −25 | 43750.97 | 46535.59 |
| TBB4_CAEEL | −1.01E+003 | −1.29E+003 | 1.88E+003 | 2.49E+003 | −24 | 43683.61 | 46649.3 |
| TBB4_CHICK | −1.14E+003 | −1.37E+003 | 2.71E+003 | 3.24E+003 | −24 | 44048.85 | 46490.78 |
| TBB4_ELEIN | −1.14E+003 | −9.75E+002 | 2.27E+003 | 2.72E+003 | −25 | 43906.03 | 46993.99 |
| TBB4_HUMAN | −1.15E+003 | −8.25E+002 | 2.06E+003 | 2.49E+003 | −25 | 44223.15 | 47073.77 |
| TBB4_MAIZE | −1.01E+003 | −9.45E+002 | 2.18E+003 | 2.58E+003 | −24 | 43757.47 | 46283.88 |
| TBB4_PORPU | −1.71E+003 | −1.27E+003 | 2.68E+003 | 3.42E+003 | −28 | 44129.26 | 47186.23 |
| TBB4_WHEAT | −7.03E+002 | −1.24E+003 | 2.34E+003 | 2.75E+003 | −25 | 43821.6 | 47046.07 |
| TBB4_XENLA | −1.18E+003 | −1.11E+003 | 2.71E+003 | 3.16E+003 | −24 | 43722.48 | 46674.76 |
| TBB5_ARATH | −1.80E+003 | −1.08E+003 | 3.25E+003 | 3.86E+003 | −28 | 44001.8 | 46634.56 |
| TBB5_CHICK | −7.93E+002 | −1.16E+003 | 2.21E+003 | 2.62E+003 | −25 | 43891.79 | 46604.44 |
| TBB5_ECTVR | −1.27E+003 | −1.16E+003 | 2.72E+003 | 3.22E+003 | −25 | 43750.92 | 46441.18 |
| TBB5_HUMAN | −8.71E+002 | −1.12E+003 | 1.95E+003 | 2.41E+003 | −24 | 43580.58 | 46339.09 |
| TBB5_MAIZE | −1.23E+003 | −1.21E+003 | 2.47E+003 | 3.01E+003 | −24 | 43798.93 | 46550.2 |
| TBB5_WHEAT | −7.11E+002 | −7.94E+002 | 2.47E+003 | 2.69E+003 | −26 | 44109.94 | 47148.65 |
| TBB6_ARATH | −1.78E+003 | −1.24E+003 | 2.49E+003 | 3.30E+003 | −28 | 44352.88 | 47605.4 |
| TBB6_CHICK | −1.10E+001 | −1.14E+003 | 1.81E+003 | 2.14E+003 | −20 | 44013.78 | 46378.76 |
| TBB6_ECTVR | −1.19E+003 | −1.20E+003 | 2.80E+003 | 3.27E+003 | −24 | 43894.94 | 46566.79 |
| TBB6_MAIZE | −8.83E+002 | −1.00E+003 | 1.53E+003 | 2.03E+003 | −25 | 44054.31 | 47248.64 |
| TBB7_ARATH | −1.53E+003 | −1.27E+003 | 3.15E+003 | 3.72E+003 | −26 | 44339.38 | 47096.68 |
| TBB7_CAEBR | −2.49E+002 | −1.05E+003 | 1.53E+003 | 1.87E+003 | −21 | 43204.36 | 45682.33 |
| TBB7_CAEEL | −1.65E+002 | −9.89E+002 | 1.48E+003 | 1.79E+003 | −19 | 43248.82 | 45913.33 |
| TBB7_CHICK | −1.07E+003 | −1.20E+003 | 2.50E+003 | 2.97E+003 | −24 | 43586.17 | 46372.26 |
| TBB7_MAIZE | −1.62E+003 | −1.02E+003 | 3.29E+003 | 3.81E+003 | −28 | 43810.2 | 46505.18 |
| TBB8_ARATH | −1.44E+003 | −1.09E+003 | 3.25E+003 | 3.72E+003 | −25 | 44295.12 | 47021.18 |
| TBB8_MAIZE | −2.88E+002 | −1.30E+003 | 1.98E+003 | 2.39E+003 | −25 | 43821.89 | 47069.82 |
| TBB9_ARATH | −1.85E+002 | −1.19E+003 | 1.87E+003 | 2.22E+003 | −27 | 43541.37 | 46710.21 |
| TBB_ACHKL | −1.49E+003 | −1.18E+003 | 2.78E+003 | 3.37E+003 | −27 | 43582.08 | 46093.01 |
| TBB_ACRCO | −2.96E+002 | −1.68E+003 | 2.83E+003 | 3.31E+003 | −25 | 44030.34 | 47131.02 |
| TBB_AJECA | −1.90E+001 | −1.42E+003 | 1.43E+003 | 2.02E+003 | −17 | 43899.95 | 46111.64 |
| TBB_ASPFL | −1.25E+003 | −1.07E+003 | 3.51E+003 | 3.88E+003 | −23 | 43818.01 | 46347.28 |
| TBB_ASPPA | −1.09E+003 | −1.17E+003 | 3.41E+003 | 3.77E+003 | −23 | 43974.21 | 46807.66 |
| TBB_BABBO | −7.24E+001 | −9.18E+002 | 9.11E+002 | 1.30E+003 | −22 | 43389.67 | 46335.4 |
| TBB_BOMMO | −1.75E+002 | −1.61E+003 | 3.52E+003 | 3.87E+003 | −25 | 44236.29 | 47190.27 |
| TBB_BOTCI | −8.12E+001 | −1.52E+003 | 2.48E+003 | 2.91E+003 | −22 | 43733.8 | 46687 |
| TBB_CANAL | −7.66E+002 | −1.32E+003 | 2.58E+003 | 3.00E+003 | −27 | 43649.84 | 45896.27 |
| TBB_CEPAC | −6.54E+002 | −1.75E+003 | 2.46E+003 | 3.09E+003 | −24 | 43755.92 | 46590.03 |
| TBB_CHLIN | −8.12E+002 | −1.08E+003 | 2.18E+003 | 2.56E+003 | −24 | 43440.63 | 46047.48 |
| TBB_CHLRE | −7.63E+002 | −1.04E+003 | 1.67E+003 | 2.11E+003 | −24 | 43580.97 | 46513.44 |
| TBB_CICAR | −1.47E+003 | −1.26E+003 | 2.76E+003 | 3.37E+003 | −26 | 44093.85 | 46346.37 |
| TBB_DICDI | −2.34E+002 | −3.61E+002 | 2.34E+003 | 2.38E+003 | −25 | 44756.23 | 46368.54 |
| TBB_EIMTE | −8.00E+002 | −1.16E+003 | 2.38E+003 | 2.76E+003 | −24 | 43849.31 | 46691.1 |
| TBB_EPITY | −1.72E+002 | −9.30E+002 | 2.54E+003 | 2.71E+003 | −24 | 43981.99 | 47087.79 |
| TBB_ERYGR | −1.11E+003 | −1.62E+003 | 2.49E+003 | 3.17E+003 | −21 | 43521.09 | 46022.36 |
| TBB_EUGGR | −5.27E+002 | −9.96E+002 | 1.74E+003 | 2.08E+003 | −28 | 43338.8 | 45940.86 |
| TBB_EUPCR | −1.29E+003 | −1.16E+003 | 2.41E+003 | 2.97E+003 | −26 | 43733.12 | 46318.45 |
| TBB_EUPFO | −3.46E+002 | −9.23E+002 | 2.17E+003 | 2.38E+003 | −23 | 43736.75 | 46621.81 |
| TBB_EUPOC | −1.09E+003 | −1.05E+003 | 2.34E+003 | 2.79E+003 | −25 | 43474.13 | 46098.76 |
| TBB_G!ALA | −1.11E+003 | −9.79E+002 | 2.43E+003 | 2.85E+003 | −24 | 43973.16 | 47134.22 |
| TBB_GIBFU | −1.09E+003 | −1.15E+003 | 3.42E+003 | 3.76E+003 | −24 | 43717.6 | 46450.54 |
| TBB_HALDI | 2.70E+002 | −1.27E+003 | 5.88E+002 | 1.43E+003 | −5 | 33789.64 | 36441.03F |
| TBB_HORVU | −1.62E+003 | −1.07E+003 | 3.28E+003 | 3.82E+003 | −27 | 43828.44 | 46711.06 |
| TBB_LEIME | −4.57E+002 | −1.16E+003 | 1.79E+003 | 2.18E+003 | −25 | 43640.51 | 46103.21 |
| TBB_LYMST | −4.11E+002 | 9.15E+001 | 1.44E+003 | 1.50E+003 | −16 | 11210.57 | 12653.09F |
| TBB_LYTPI | −1.31E+003 | −6.00E+002 | 3.00E+003 | 3.33E+003 | −13 | 17813.1 | 19768.08F |
| TBB_MYCPJ | −1.06E+003 | −1.44E+003 | 3.06E+003 | 3.54E+003 | −22 | 43590.41 | 46322.14 |
| TBB_NAEGR | −9.11E+002 | −1.50E+003 | 2.96E+003 | 3.44E+003 | −26 | 44385.1 | 47524.01 |
| TBB_NEUCR | −8.67E+002 | −1.30E+003 | 3.63E+003 | 3.95E+003 | −24 | 43678.94 | 46401.01 |
| TBB_OCTDO | −7.15E+002 | −5.08E+002 | 1.86E+003 | 2.06E+003 | −23 | 44106.16 | 46618.28 |
| TBB_ONCGI | −7.02E+002 | −1.07E+003 | 2.06E+003 | 2.42E+003 | −21 | 43865.63 | 46450.72 |
| TBB_PARLI | −1.51E+003 | −1.20E+003 | 3.26E+003 | 3.78E+003 | −26 | 43883.1 | 46679.47 |
| TBB_PENDI | −4.37E+002 | −1.44E+003 | 2.26E+003 | 2.71E+003 | −21 | 43814.64 | 46891.07 |
| TBB_PESMI | −3.95E+002 | −1.50E+003 | 2.53E+003 | 2.97E+003 | −24 | 43722.64 | 46550.51 |
| TBB_PHANO | −7.61E+002 | −1.12E+003 | 2.67E+003 | 2.99E+003 | −21 | 43777.75 | 46470 |
| TBB_PHYCI | −6.90E+002 | −1.01E+003 | 1.92E+003 | 2.27E+003 | −24 | 43659.2 | 46213.31 |
| TBB_PIG | −3.59E+002 | −1.55E+003 | 1.91E+003 | 2.48E+003 | −25 | 43854.42 | 47042.18 |
| TBB_PLASA | −6.56E+002 | −1.43E+003 | 1.55E+003 | 2.21E+003 | −28 | 43731.91 | 46620.07 |
| TBB_PLAFK | −1.06E+003 | −1.24E+003 | 1.40E+003 | 2.14E+003 | −27 | 43684.84 | 46607.02 |
| TBB_PLESA | −1.51E+003 | −1.06E+003 | 2.51E+003 | 3.12E+003 | −25 | 44047.21 | 46981.21 |
| TBB_PNECA | 5.85E+001 | −7.05E+002 | 1.77E+003 | 1.90E+003 | −22 | 43093.29 | 45488.54 |
| TBB_POLAG | −9.12E+002 | −1.12E+003 | 2.29E+003 | 2.71E+003 | −24 | 43428.91 | 45898.77 |
| TBB_PSEAM | −1.11E+003 | −1.06E+003 | 1.54E+003 | 2.18E+003 | −25 | 43784.36 | 46877.34 |
| TBBQ_HUMAN | −2.77E+002 | −7.68E+002 | 5.86E+002 | 1.00E+003 | −18 | 42440.37 | 44994.21 |
| TBB_RHYSE | −1.13E+003 | −1.49E+003 | 3.08E+003 | 3.60E+003 | −21 | 43739.88 | 46423.03 |
| TBB_SCHCO | −7.83E+002 | −1.13E+003 | 1.60E+003 | 2.11E+003 | −25 | 43970.42 | 46854.63 |
| TBB_SCHPO | −4.48E+002 | −8.91E+002 | 2.11E+003 | 2.33E+003 | −27 | 43446.86 | 45913.99 |
| TBB_STRPU | −6.17E+002 | −1.36E+003 | 3.07E+003 | 3.41E+003 | −18 | 29275.73 | 31526.12F |
| TBB_STYLE | −9.53E+002 | −1.02E+003 | 2.15E+003 | 2.56E+003 | −24 | 43277.04 | 45763.19 |
| TBB_TETPY | −5.66E+002 | −8.36E+002 | 1.78E+003 | 2.05E+003 | −24 | 43557.91 | 46339.63 |
| TBB_TETTH | −5.22E+002 | −8.68E+002 | 1.71E+003 | 1.99E+003 | −25 | 43553.05 | 46384.46 |
| TBB_THAWE | −9.42E+002 | −1.14E+003 | 2.35E+003 | 2.78E+003 | −23 | 43337.8 | 45963.07 |
| TBB_TOXGO | −1.44E+003 | −1.21E+003 | 2.28E+003 | 2.96E+003 | −27 | 43887.58 | 46652.72 |
| TBB_TRYBR | −9.50E+001 | −1.16E+003 | 1.42E+003 | 1.84E+003 | −24 | 43475.69 | 45924.44 |
| TBB_TRYCR | −5.27E+002 | −1.06E+003 | 1.56E+003 | 1.96E+003 | −25 | 43396.83 | 45908.56 |
| TBB_VENIN | −1.12E+003 | −1.36E+003 | 3.10E+003 | 3.56E+003 | −22 | 43549.74 | 46256.71 |
| TBBX_HUMAN | −1.07E+003 | −1.20E+003 | 2.50E+003 | 2.97E+003 | −24 | 43586.17 | 46372.26 |
| TBB_YEAST | −1.38E+003 | −3.14E+002 | 3.25E+003 | 3.54E+003 | −31 | 44568.68 | 47245.65 |
| TBD_HUMAN | −2.52E+002 | −1.29E+003 | 3.67E+002 | 1.36E+003 | −5 | 44650.69 | 45579.63 |
| TBE_HUMAN | 5.31E+002 | −4.99E+002 | 4.47E+002 | 8.55E+002 | −6 | | |
| TBG1_HUMAN | 7.16E+002 | −1.58E+003 | −6.03E+002 | 1.84E+003 | −10 | 44645.36 | 45231.14 |
| TBG1_MAIZE | 8.07E+002 | −1.90E+003 | −3.86E+002 | 2.10E+003 | −10 | 46058.94 | 46110.79 |
| TBG1_MOUSE | 5.56E+002 | −1.71E+003 | −8.73E+002 | 2.00E+003 | −11 | 44751.95 | 45706.51 |
| TBG2_ARATH | 1.46E+003 | −2.04E+003 | 5.26E+002 | 2.56E+003 | −10 | 46598.89 | 47773.51 |
| TBG2_DROME | 8.15E+002 | −1.58E+003 | −8.50E+002 | 1.97E+003 | −6 | 44800.18 | 45401.53 |
| TBG2_EUPCR | 3.78E+002 | −1.86E+003 | −7.45E+002 | 2.04E+003 | −15 | 45632.97 | 46882.17 |
| TBG2_EUPOC | 4.42E+001 | −2.22E+003 | −3.12E+002 | 2.24E+003 | −10 | 45771.97 | 47628.98 |
| TBG2_HUMAN | 5.46E+002 | −1.57E+003 | −3.46E+002 | 1.70E+003 | −13 | 44707.12 | 45746.7 |
| TBG2_MAIZE | 4.62E+002 | −1.85E+003 | −5.21E+002 | 1.98E+003 | −12 | | |
| TBG2_MOUSE | 3.57E+002 | −1.22E+003 | −6.91E+002 | 1.45E+003 | −10 | 44770.54 | 45966.96 |
| TBG2_ORYSA | 7.37E+002 | −1.71E+003 | −6.59E+002 | 1.97E+003 | −12 | 46151.43 | 46463.29 |
| TBG3_MAIZE | 7.36E+002 | −1.95E+003 | −1.05E+002 | 2.09E+003 | −9 | 41586.56 | 42200.31F |
| TBG_ANEPH | 1.48E+003 | −2.35E+003 | 3.46E+002 | 2.79E+003 | −9 | 46391.54 | 47490.67 |
| TBG_CAEEL | 3.04E+002 | −1.06E+003 | −8.91E+002 | 1.42E+003 | −9 | 43944.74 | 45972.73 |
| TBG_CANAL | 1.34E+003 | −1.39E+003 | 1.90E+003 | 2.71E+003 | −23 | | |
| TBG_CHLRE | 7.24E+002 | −1.85E+003 | −3.37E+002 | 2.02E+003 | −6 | 45684.61 | 46543.6 |
| TBG_COCHE | 4.43E+002 | −8.17E+002 | −5.81E+002 | 1.10E+003 | −2 | 26054.95 | 27657.99F |
| TBG_EMENI | 7.59E+002 | −1.72E+003 | −7.19E+002 | 2.01E+003 | −9 | 44602.99 | 46275.01 |
| TBG_ENTHI | 1.65E+002 | −9.20E+002 | −8.38E+002 | 1.26E+003 | −6 | 45398.09 | 46350.19 |
| TBG_EUPAE | 7.82E+002 | −1.99E+003 | −3.07E+002 | 2.16E+003 | −10 | 45766.71 | 47108.63 |
| TBG_NEUCR | 5.63E+002 | −1.98E+003 | −3.09E+002 | 2.08E+003 | −9 | 45255.26 | 46777.78 |
| TBG_PHYPA | 1.25E+003 | −2.49E+003 | 2.51E+001 | 2.78E+003 | −8 | 46549.14 | 47781.9 |
| TBG_PLAFO | 6.66E+002 | −2.18E+003 | −7.53E+002 | 2.40E+003 | −7 | 45179.34 | 46542.13 |
| TBG_RETFI | 1.16E+003 | −1.59E+003 | −5.16E+002 | 2.04E+003 | −4 | 47100.48 | 48598.68 |
| TBG_SCHJP | 1.95E+000 | −1.81E+003 | −6.21E+002 | 1.91E+003 | −7 | 44087.45 | 45523.53 |
| TBG_SCHPO | 3.32E+002 | −1.54E+003 | −3.58E+002 | 1.62E+003 | −8 | 43930.03 | 45423.04 |
| TBG_USTVI | 7.32E+002 | −1.61E+003 | −8.74E+002 | 1.97E+003 | −10 | 45915.36 | 47039.01 |
| TBG_XENLA | 8.58E+002 | −1.48E+003 | −8.55E+002 | 1.91E+003 | −9 | 44698.46 | 45367.78 |
| TBG_YEAST | 9.08E+002 | −1.50E+003 | 1.31E+003 | 2.19E+003 | −30 | 45777.95 | 47349.09 |

[0074] As is also disclosed in the Tuszynski paper, “FIG. 1a shows a scatter diagram of the net/charge/volume ratios of the different tubulins. This plot is striking in that the net charge on the beta-tubulins is bar far the greatest, ranging between −17 and −32 elementary charges (e) depending upon the particular beta-tubulin with an average value in this case at approximately −25e. Next comes the alpha-tubulins whose net charges vary between −10 and 1-25 elementary charges . . . . There appears to be little if any correlation between the size of a protein and its charge . . . . Further, it should be kept in mind, that the charge on a tubulin dimmer will be neutralized in solution due to the presence of counter-ions which almost completely screen the net charge. This was experimentally determined for tubulin by the application of an external electric field; the resulting value of an unscreened charge of approximately 0.2e per monomer was found Stracke et al. 2002.” The reference to Stracke et al. was to an article by R. Stracke, J. A. Tuszynski, et al. regarding “Analysis of the migration behaviour of single microtubules in electric fields,” Biochemical and Biophysical Research Communications, 293:606-609, 2002.

[0075] As is also disclosed in the Tuszynski paper, “What is, however, of great interest in connection with polymerization of tubulin into microtubules and with drug-protein binding is the actual distribution of charges on the surface of the tublin. FIG. 3 illustrates this for the Downing-Nogales structure with plus signs indicating the regions of positively charged and minus signs negatively charged locations. This figure shows C-termini in two very upright positions. Of course, each of the different tubulins will show differences in this regard . . . . ”

[0076] As is also disclosed in the Tuszynski paper, “ . . . alpha tubulins have relatively low dipole moments about their centres-of-mass, ranging between 1000 and 2000 Debye, while the beta-tubulins are very high in this regard with the corresponding values ranging between 1000 and 4000 Debye and with the average value close to 3000 Debye . . . . In FIG. 2 we have illustrated the important aspect of dipole organization for tubulin, namely its orientation. FIG. 2a shows a Mollweide projection of dipole orientation in tubulin . . . We conclude from this diagram and its magnification . . . that both alpha- and beta-tubulins orient their dipose moments in a direction that is close to being perpendicular to the microtubule surface . . . . ”

[0077] As is also disclosed in the Tuszynski paper, “FIG. 1c shows the logarithm of surface area against the logarithm of volume for the different tubulins . . . . Note that the alpha and beta families have a very similar slope with a value close to the unity that is indicative of cylindrical symmetry in the overall geometry . . . . ”

[0078] As is also disclosed in the Tuszynski paper, “Our models show that only alpha- and beta-tubulins have C-termini that project outwards from the tubulin, due to their high negative charges. FIG. 5 shows the energy levels of different orientational positons of the C-termini in a toy model and suggests that there is relatively little energetic difference between projecting straight outward from the rest of the tublin and lying on the surface of tubulin in certain energy minima . . . . ”

[0079] As is also disclosed in the Tuszynski et al. paper, “Isotype compositon has a demonstrable effect on microtubule assembly kinetics (Panda et al., 1994).” The Panda et al. reference was an article by D. Panda et al. on “Microtubule dynamics in vitro are regulated by the tubulin isotype composition,” Proc. Natl. Acad. Sci. USA 91:11 358-11 362, 1994.

[0080] As is also disclosed in the Tuszynski paper, “This could be due to changes in the electrostatics of tubulin, which although significantly screened by counter-ions does affect microtubule assembly by influencing dimer-dimer interactions over relatively short distances (approximagely 5 nm) as well as the kinetics of assembly. These short-range interactions have recently been studied by Sept et al. (2003) by calculating the energy of protofilament-protofilaent interactions. These authors concluced from their work that the two types of microtubule lattices (A and B) correspond to the local energy minima.” The Sept et al. reference was to an article by D. Sept et al., “The physical basis of microtubule structure and stability,” Protein Science, 12:2257-2261, 2003.

[0081] As is also disclosed in the Tuszynski paper, “The dipole moment could play a role in microtubule assembly and in other processes. This could be instrumental in the docking process of molecules to tubulin and in the proper steric configuration of a tubulin dimer as it approaches a microtubule for binding: An isolated dimer has an electric field dominated by its net charge . . . . In contrast, a tubulin dimer . . . surrounded by water molecules and counter-ions, as is physiologically relevant, has an isopotential surface with two lobes much like the dumbbell shape of a mathematically dipole moment. The greater the dipole of of each of its units is, the less stable the microtubule since dipole-dipole interactions provide a positive energy disfavoring a microtubule structure. Note that the strength of the interaction potential is proportional to the square of the dipole moment, hence microtubule structures formed from tubulin units with larger dipoles momements should be more prone to undergo disassembly catastrophes compoared to those microtubles that contain low dipole moment tubulins. For organisms that express more than one type of tubulin isotype in the same cell, one can conceive that microtubule dynamic behavior could be regulated by altering the relative amounts of the different isotypes according to their dipole moments.”

[0082] As is also disclosed in the Tuszynski paper, “In terms of surface/volume ratios, α- and β-tubulin are the least compact, while γ, δ and ε are the most compact. There is abundant evidence that both α and β have flexible conformations. This is attested to by their interaction with drugs and is consistent with the dynamic instability of microtubules. In contrast, there is as yet no evidence of dynamic instability in γ, δ and ε partcipating in dynamic instability, nor is there any theoretical reason to imagine such flexibility. It is reasonable to postulate that a less compact structure may have a more flexible conformation.”

[0083] As is also disclosed in the Tuszynski et al. paper, “Our models predict that the C-termini of α and β can readily adopt the two extreme conformations: either projecting outwards from the tubulin (and the microtubule surface) or to lie on the surface, albeit such that their charged residues can form electrostatic bonds with complimentary charges on the surface. The state of the C-terminus (upright, down, or in intermediate states) down) is easily influenced by the local ion concentration including pH. This conformational complexity has many implications (Pal et al., 2001).” The Pal et al. reference is an article by D. Pal et al. on “Conformational properties of alpha-tubulin tail peptide: implications for tail-body interaction,” Biochemistry, 40: 15 512-15 519, 2001.

[0084] As is also disclosed in the Tuszynski paper, “First, a projecting C-terminus could play a major role in signaling. The fact that tubulin isotypes differ markedly in the C-termini suggests that specific sequences may mediate the functional roles of the isotypes. These sequences would be readily available for interactions with other proteins in a projecting C-terminus. Second, the C-termini are the sites of many of the post-translational modifications of tubulin—polyglutamylation, polyglycylation, detyrosinolation/tyrosinolation, removal of the penultimate glutamic acid, and phosphorylation of serine and tyrosine (Redeker et al., 1998).” The Redeker et al. reference was an article by V. Redekere et al. on “Posttranslational modifications of the C-terminus of alpha-tubulin in adult rat brain: alpha 4 is glutamylated at two residues,” Biochemistry, 37: 14 838-14 844, 1998.

[0085] As is also disclosed in the Tuszynski paper, “It is known that the C-termini are essential to normal microtubule function (Duan and Gorovsky, 2002); a projecting C-terminus would be easily accessible to enzymes that affect these modifications and also the modification could influence the likelihood of the C-terminus changing conformation. In addition, if the modification plays a role in signaling then the signal would be readily available in a projecting C-terminus, as already mentioned.” The reference to Duan and Gorovsky is to an article by J. Duan et al., “Both carboxy-termianl tails of alpha- and beta-tubulin are essential, but either one will suffice,” Current Biology, 12:313-316, 2002.

[0086] As is also disclosed in the Tuszynski et al. paper, “Third, projecting C-termini would automatically create spacing between microtubules. It is known that microtubules are never closely packed and are surrounded by what is referred to as an exclusion zone.(Dustin, 1984).” The reference to Dustin is to a book by P. Dustin on “Microtubules (Springer-Verlag, Berlin, 1984).

[0087] As is also disclosed in the Tuszynski paper, “This is a region of space around them that strongly disfavors the presence of other microtubules in the vicinity. Although MAPs could play a role in such spacing, electrostatic repulsion among C-terminal ends are likely to influence this as well. The C-termini are the major sites of binding of the MAPs to tubulin. A projecting C-terminus may facilitate MAP binding and, conversely, MAP binding could influence the conformation of the C-terminus. Evidence for this is provided by the work of Makridis et al who showed that when tau binds to microtubules, it triggers a structural change on the microtubule surface whereby a structural element, presumably tau, lies along the surface of the microtubule forming a lattice whose alingement angle is much sharper than that of the tubulin subunits. This lattice is presumably superimposed on top of the normal microtubule (A or B) lattice. The orientation of the C-termini when they are lying on the surface of the microtubule form exactly the same kind of lattice that (Makridis et al, 2003) observed, a striking confirmation of the potential accuracy of our modeling . . . . These results raise the possibility that the orientation of the C-termini of the alpha and beta subunits determines the arrangement of tau molecules on the microtubule.” The Makrides reference referred to is an article by V. Markrides et al., “Microtubule-dependent oligomerization of tau: Implicatons for physiological tau function and tauopathies,” J. Biol. Chem., 278:33 298-33 304, 2003.

[0088] As is also disclosed in the Tuszynski et al. paper, “ . . . the state of the C-termini could mediate how motor proteins such as kinesin bind to and move on microtubules. Our models show that kinesin can only bind to upright C-termini . . . and not to C-termini lying on the surface of the microtubule . . . Very minor changes in the local ionic environment or the pH could halt the progress of kinesin by collapsing the C-termini. One can postulate that the proportion of C-termini that are in the upright conformation in a given portion of the microtubule could determine the actual rate of kinesin movement. It is likely that such arguments could apply to other motor proteins as well. One might imagine that the very fine coordination of movements that occur in processes such as mitosis could be influenced or even caused by the conformational state of the C-termini in particular areas of the microtubule.”

[0089] As is also disclosed in the Tuszynski paper, “Finally, one can imagine that the C-termini could collapse in waves that could simultaneously move a wave of ions that could polarize or depolarize a membrane. This could be a form of microtubule signaling that has not yet been considered. A quantitative model of ionic wave transmission coupled to co-ordinated motion of the C-termini of dendritic microtubules has been recently developed by Priel et al . . . . ” The refererence to Priel et al. was to an article by A. Priel et al. entitled “Moleuclar Dynamics of C-termini in Tubulin: Implications for Transport to Active Synapsis,” submitted to Biophys. J., 2003.

[0090] Table 1 of the Tuszynksi paper disclosed the tubulin sequences used in the study reported in the article. In such Table 1, the table names the names the source organism, and for each α, β, γ, δ, and ε, gives the name used in the databank.

The use of Particular Models of Isotypes of Tubulin for Drug Development

[0091] In one embodiment of the invention, once a particular tubulin isotype has been identified as being of interest, and once a three-dimensional model of it has been made in accordance with the process of this invention, this model may then be used to identify which drug or drugs would most advantageously interact with the binding sites of the tubulin isotype in question.

[0092] The preferred binding sites which may be used in the process of identifying the candidate drugs are discussed in the next section of this specification.

Preferred Binding Sites of Tubulin Isotypes

[0093] It is known that many chemotherapeutic drugs effect their primary actions by inhibiting tubulin polymerization. Thus, as is disclosed in U.S. Pat. No. 6,162,930 (the entire disclosure of which is hereby incorporated by reference into this specification), “An aggressive chemotherapeutic strategy toward the treatment and maintenance of solid-tumor cancers continues to rely on the development of architecturally new and biologically more potent anti-tumor, anti-mitotic agents. A variety of clinically-promising compounds which demonstrate potent cytotoxic and anti-tumor activity are known to effect their primary mode of action through an efficient inhibition of tubulin polymerization (Gerwick et al.). This class of compounds undergoes an initial binding interaction to the ubiquitous protein tubulin which in turn arrests the ability of tubulin to polymerize into microtubules which are essential components for cell maintenance and cell division (Owellen et al.).”

[0094] U.S. Pat. No. 6,162,930 also discloses that the precise means by which the cytotoxic agents “ . . . arrests the ability of tubulin to polymerize . . . ” is unknown, stating that: “Currently the most recognized and clinically useful tubulin polymerization inhibitors for the treatment of cancer are vinblastine and vincristine (Lavielle, et al.). Additionally, the natural products rhizoxin (Nakada, et al., 1993a and 1993b; Boger et al.; Rao et al., 1992 and 1993; Kobayashi et al., 1992 and 1993) combretastin A-4 and A-2 (Lin et al.; Pettit, et al., 1982, 1985, and 1987) and taxol (Kingston et al.; Schiff et al; Swindell, et a, 1991; Parness, et. al.) as well as certain synthetic analogues including the 2-styrylquinazolin-4(3H)-ones (SQO) (Jiang et al.) and highly oxygenated derivatives of cis- and trans-stilbene (Cushman et al.) and dihydrostilbene are all known to mediate their cytotoxic activity through a binding interaction with tubulin. The exact nature of this interaction remains unknown and most likely varies somewhat between the series of compounds.”

[0095] U.S. Pat. No. 6,512,003 also discusses the “ . . . nature of this unknown interaction . . . ,” stating that (at column 1) “Novel tubulin-binding molecules, which, upon binding to tubulin, interfere with tubulin polymerization, can provide novel agents for the inhibition of cellular proliferation and treatement of cancer.” U.S. Pat. No. 6,512,003 presents a general discussion of the role of tubulin in cellular proliferation, disclosing (also at colum 1) that: Cellular proliferation, for example, in cancer and other cell proliferative disorders, occurs as a result of cell division, or mitosis. Microtubules play a pivotal role in mitotic spindle assembly and cell division . . . . These cytoskeletal elements are formed by the self-association of the ad tubulin heterodimers . . . . Agents which induce depolymerization of tubulin and/or inhibit the polymerization of tubulin provide a therapeutic approach to the treatment of cell proliferation disorders such as cancer. Recently, the structure of the .alpha.β tubulin dimer was resolved by electron crystallography of zinc-induced tubulin sheets . . . . According to the reported atomic model, each 46×40×65.ANG. tubulin monomer is made up of a 205 amino acid N-terminal GTP/GDP binding domain with a Rossman fold topology typical for nucleotide-binding proteins, a 180 amino acid intermediate domain comprised of a mixed β sheet and five helices which contain the taxol binding site, and a predominantly helical C-terminal domain implicated in binding of microtubule-associated protein (MAP) and motor proteins . . . . ”

[0096] U.S. Pat. No. 6,512,003 also teaches that the the binding site of vinca alkaloids to tubulin differs from the binding site of colchicin to tublin, stating (also at column 1) that: “Spongistatin (SP) . . . is a potent tubulin depolymerizing natural product isolated from an Eastern Indian Ocean sponge in the genus Spongia . . . . Spongistatins are 32-membered macrocyclic lactone compounds with a spongipyran ring system containing 4 pyran-type rings incorporated into two spiro[5.5]ketal moieties . . . . In cytotoxicity assays, spongistatin (SP) exhibited potent cytotoxicity with subnanomolar IC50 values against an NCI panel of 60 human cancer cell lines . . . . SP was found to inhibit the binding of vinc alkaloids (but not colchicin) to tubulin . . . , indicating that the binding site for this potent tubulin depolymerizing agent may also serve as a binding region for vinc alkaloids.”

[0097] U.S. Pat. No. 6,593,374, the entire disclsoure of which is hereby incorporated by reference into this specification, presents a “working hypothesis” that the “ . . . methoxy aryl functionality . . . ” is especially important for binding at the colchicin binding site. It discloses (at columns 1-2 thereof) that: “An important aspect of this work requires a detailed understanding, on the molecular level, of the ‘small molecule’ binding domain of both the .alpha. and β subunits of tubulin. The tertiary structure of the .alpha.,β tubulin heterodimer was reported in 1998 by Downing and co-workers at a resolution of 3.7 .ANG. using a technique known as electron crystallography . . . .This brilliant accomplishment culminates decades of work directed toward the elucidation of this structure and should facilitate the identification of small molecule binding sites, such as the colchicine site, through techniques such as photoaffinity and chemical affinity labeling . . . . We have developed a working hypothesis suggesting that the discovery of new antimitotic agents may result from the judicious combination of a molecular template (scaffold) which in appropriately substituted form (ie. phenolic moieties, etc.) interacts with estrogen receptor (ER), suitably modified with structural features deemed imperative for tubulin binding (arylalkoxy groups, certain halogen substitutions, etc.). The methoxy aryl functionality seems especially important for increased interaction at the colchicine binding site in certain analogs . . . . Upon formulation of this hypothesis concerning ER molecular templates, our initial design and synthesis efforts centered on benzo[b]thiophene ligands modeled after raloxifene, the selective estrogen receptor modulator (SERM) developed by Eli Lilly and Co . . . . Our initial studies resulted in the preparation of a very active benzo[b]thiophene-based antitubulin agent . . . . In further support of our hypothesis, recent studies have shown that certain estrogen receptor (ER) binding compounds as structurally modified estradiol congeners (2-methoxyestradiol, for example) interact with tubulin and inhibit tubulin polymerization . . . . Estradiol is, of course, perhaps the most important estrogen in humans, and it is intriguing and instructive that the addition of the methoxy aryl motif to this compound makes it interactive with tubulin. It is also noteworthy that 2-methoxyestradiol is a natural mammalian metabolite of estradiol and may play a cell growth regulatory role especially prominent during pregnancy. The term ‘phenolic moiety’ means herein a hydroxy group when it refers to an R group on an aryl ring.”

[0098] As is also discisoed in U.S. Pat. No. 6,593,374 (at column 1 thereof), “Tubulin is currently among the most attractive therapeutic targets in new drug design for the treatment of solid tumors. The heralded success of vincristine and taxol along with the promise of combretastatin A-4 (CSA-4) prodrug and dolastatin . . . , to name just a few, have firmly established the clinical efficacy of these antimitotic agents for cancer treatment. An aggressive chemotherapeutic strategy toward the treatment and maintenance of solid-tumor cancers continues to rely on the development of architecturally new and biologically more potent anti-tumor, anti-mitotic agents which mediate their effect through a direct binding interaction with tubulin. A variety of clinically-promising compounds which demonstrate potent cytotoxicity and antitumor activity are known to effect their primary mode of action through an efficient inhibition of tubulin polymerization . . . . This class of compounds undergoes an initial interaction (binding) to the ubiquitous protein tubulin which in turn arrests the ability of tubulin to polymerize into microtubules which are essential components for cell maintenance and division . . . . During metaphase of the cell cycle, the nuclear membrane has broken down and the cytoskeletal protein tubulin is able to form centrosomes (also called microtubule organizing centers) and through polymerization and depolymerization of tubulin the dividing chromosomes are separated. Currently, the most recognized and clinically useful members of this class of antimitotic, antitumor agents are vinblastine and vincristine . . . along with taxol . . . . Additionally, the natural products rhizoxin, . . . combretastatin A-4 and A-2, . . . curacin A, . . . podophyllotoxin, . . . epothilones A and B, . . . dolastatin 10 . . . and welwistatin . . . (to name just a few) as well as certain synthetic analogues including phenstatin, . . . the 2-styrylquinazolin-4(3H)-ones (SQO), . . . and highly oxygenated derivatives of cis- and trans-stilbene . . . and dihydrostilbene are all known to mediate their cytotoxic activity through a binding interaction with tubulin. The exact nature of this binding site interaction remains largely unknown, and definitely varies between the series of compounds.”

[0099] Published United States patent application 2004/0044059, the entire disclosure of which is hereby incorporated by reference into this specification, also discloses the uncertaintly that exists with regard to the “ . . . tubulin binding site interactions . . . ” At page 1 thereof, it states that: “The exact nature of tubulin binding site interactions remain largely unknown, and they definitely vary between each class of Tubulin Binding Agent. Photoaffinity labeling and other binding site elucidation techniques have identified three key binding sites on tubulin: 1) the Colchicine site (Floyd et al, Biochemistry, 1989; Staretz et al, J. Org. Chem., 1993; Williams et al, J. Biol. Chem., 1985; Wolff et al, Proc. Natl. Acad. Sci. U.S.A., 1991),2) the Vinca Alkaloid site (Safa et al, Biochemistry, 1987), and 3) a site on the polymerized microtubule to which taxol binds (Rao et al, J. Natl. Cancer Inst., 1992; Lin et al, Biochemistry, 1989; Sawada et al, Bioconjugate Chem, 1993; Sawada et al, Biochem. Biophys. Res. Commun., 1991; Sawada et al, Biochem. Pharmacol., 1993). An important aspect of this work requires a detailed understanding, at the molecular level, of the ‘small molecule’ binding domain of both the α and β subunits of tubulin. The tertiary structure of the α,β tubulin heterodimer was reported in 1998 by Downing and co-workers at a resolution of 3.7 using a technique known as electron crystallography (Nogales et al, Nature, 1998). This brilliant accomplishment culminates decades of work directed toward the elucidation of this structure and should facilitate the identification of small molecule binding sites, such as the colchicine site, using techniques such as photoaffinity and chemical affinity labeling (Chavan et al, Bioconjugate Chem., 1993; Hahn et al, Photochem. Photobiol., 1992).”

[0100] As is also disclosed in published United States patent application 2004/0044059, “The cytoskeletal protein tubulin is among the most attractive therapeutic drug targets for the treatment of solid tumors. A particularly successful class of chemotherapeutics mediates its anti-tumor effect through a direct binding interaction with tubulin. This clinically-promising class of therapeutics, called Tubulin Binding Agents, exhibit potent tumor cell cytotoxicity by efficiently inhibiting the polymerization of αβ-tubulin heterodimers into the microtubule structures that are required for facilitation of mitosis or cell division (Hamel, Medicinal Research Reviews, 1996). . . . Currently, the most recognized and clinically useful antitumor agents are Vinca Alkaloids, such as Vinblastine and Vincristine (Owellen et al, Cancer Res., 1976; Lavielle et al, J. Med. Chem., 1991) along with Taxanes such Taxol (Kingston, J. Nat. Prod., 1990; Schiff et al, Nature, 1979; Swindell et al, J. Cell Biol., 1981). Additionally, natural products such as Rhizoxin (Nakada et al, Tetrahedron Lett., 1993; Boger et al, J. Org. Chem., 1992; Rao, et al, Tetrahedron Lett., 1992; Kobayashi et al, Pure Appl. Chem., 1992; Kobayashi et al, Indian J. Chem., 1993; Rao et al, Tetrahedron Lett., 1993), the Combretastatins (Lin et al, Biochemistry, 1989; Pettit et al, J. Nat. Prod., 1987; Pettit et al, J. Org. Chem., 1985; Pettit et al, Can. J. Chem., 1982; Dorr et al, Invest. New Drugs, 1996), Curacin A (Gerwick et al, J. Org. Chem., 59:1243, 1994), Podophyllotoxin (Hammonds et al, J. Med. Microbiol, 1996; Coretese et al, J. Biol. Chem., 1977), Epothilones A and B (Nicolau et al., Nature, 1997), Dolastatin-10 (Pettit et al, J. Am. Chem. Soc., 1987; Pettit et al, Anti-Cancer Drug Des., 1998), and Welwistatin (Zhang et al, Molecular Pharmacology, 1996), as well as certain synthetic analogues including Phenstatin (Pettit G R et al., J. Med. Chem., 1998), 2-styrylquinazolin-4(3H)-ones (“SQOs”, Jiang et al, J. Med. Chem., 1990), and highly oxygenated derivatives of cis- and trans-stilbene and dihydrostilbene (Cushman et al, J. Med. Chem., 1991) are all known to mediate their tumor cytotoxic activity through tubulin binding and subsequent inhibition of mitosis.”

[0101] As is also disclosed in published United States patent application 2004/0044059, “Normally, during the metaphase of cell mitosis, the nuclear membrane has broken down and tubulin is able to form centrosomes (also called microtubule organizing centers) which facilitate the formation of a microtubule spindle apparatus to which the dividing chromosomes become attached. Subsequent polymerization and depolymerization of the spindle apparatus mitigates the separation of the daughter chromosomes during anaphase such that each daughter cell contains a full complement of chromosomes. As antiproliferatives or antimitotic agents, Tubulin Binding Agents exploit the relatively rapid mitosis that occurs in proliferating tumor cells. By binding to tubulin and inhibiting the formation of the spindle apparatus in a tumor cell, the Tubulin Binding Agent can cause significant tumor cell cytotoxicity with relatively minor effects on the slowly-dividing normal cells of the patient.”

[0102] An article by Mary Ann Jordan et al., entitled “Microtubules as a target for anticancer drugs,” appeared in Nature Reviews/Cancer, Volume 4, April 2004, pages 253-266. At page 253 of this article, it was disclosed that: “Microtubles are extremely important in the process of mitosis . . . . Their importance in mitosis and cell divison makes microtubles an important target for anticancer drugs. Microtubules and their dynamics are the targets of a chemically diverse group of antimitotic drugs (with various tubulin-binding sites) that have been used with great success in the treatment of cancer . . . . In view of the success of this class of drugs, it has been argued that microtubules represent the best cancer target to be identified so far . . . . ”

[0103] The polymerization dynamics of microtubules are discussed at pages 254 et seq. of the Jordan paper, wherein it is disclosed that: “The polymerization if microtubules occurs by a nucleation-elongation mechanism in which the relatively slow formation of a short microtubule ‘nucleus’ is followed by rapid elongation of the microtubule at its ends by the reversible, non-covalent addition of tubulin dimers . . . . It is important to emphasize that microtubues are not simple equilibrium polymers. The show complex polymerization dynamics that use energy provided by the hydrolysis of GTP at the time that tubulin with bound GTP adds to the microtubule ends; these dynamics are crucial to their cellular functions.”

[0104] The Jordan et al. article also disloses that: “ . . . the correct movements of the chromosomes and their proper segregation to daughter cells require extremely rapid dynamics, making mitosis exquisitely sensitive to microtubule-targeted drugs.”

[0105] The Jordan et al. article also disloses that: “The biological functions of microtubules in all cells are determined and regulated in large part by their polymerization dynamics . . . Microtubules show two kinds of non-equilibrium dynamics, both with purified microtubule systes in vitro and in cells.”

[0106] The Jordan et al. article also discloses (at page 257, “Box 1”) how one may measure microtubule dynamic instability. It states that:“With purified microtubules in vitro (generally purified from pig, cow, or sheep brains, which are a rich source of microtubules), dynamic instability of individual microtubules is measured by computer-enhanced time-lapse differential interference contrast microscopy. In living cells, individual fluorescent microtubules can be readily visualized in the thin peripheral regions of the cells after microinjection of fluorescent tubulin or by expressnion of GFP (green fluorescent protein) labeled tubulin. The growing and shortening dynamics of the microtubules, which are prominent in this region of interphase cells, are recorded by time-lapse using a sensitive CCD (charge-coupled device) camera. To determine how microtubule length changes with time, both in vitro and in living cells, the ends of the individual growing and shortening microtubules are traced by a cursor on succeeding time-lapse frames, recorded, and their rates, lengths, and durations of growing and shortening are calculated from the sequence of record x-=y positons of the microtubule ends.”

[0107] The “dynamic instability” phenomenon is discussed at page 254 of the Jordan et al. article, wherein it is disclosed that: “One kind of dynamic behavior that is highly prominent in cells, called ‘dynamic instability,’ is a process in which the individual microtubule ends switch between phases of growth and shortening . . . The two ends of a microtubule are not equivalent: one end, called the plus end, grows and shortens more rapidly and more extensively than the other (the minus end). . . . The microtubules undergo relatively long periods of slow lengthening, brief periods of rapid shortening, and periods of attenuated dynamics or pause, when the microtubules neither gorw nor shorten detectably . . . . Dynamic instability is characterized by four main variables: the rate of microtubule growth; the rate of shortening; the frequency of transition from the growth or paused state to shortening (this transitionis called a ‘catastrophe’); and the frequency of transition from shortening to growth or pause (called a ‘rescue’). Periods of pause are defined operationally, when any changes in microtubule length that might be occurring are below the resolution of the light microscope. The variable called ‘dynamicity’ is highly useful to describve the overall visually detectable rate of exchange of tubulin dimmers with microtubule ends.”

[0108] The Jordan et al. article also discloses that: “The second dynamic behavior, called ‘treadmilling’ . . . is net growth at one microtubule end and balanced net shortening at the opposite end . . . It involves the intrinsic flow of tubulin subunits from the plus end of the microtubule to the minus end and is created by differences in the critical subunit concentrations at the opposite microtubule ends. (The critical subunit concentrations are the concentrations of the free tubulin subunits in equilibrium with the microtubule ends.). This behavior occurs in cells as well as in vitro and might be particularly important in mitosis . . . . Treadmilling and dynamic instability are compatible behaviours, and a specific microtubule population can show primary treadmilling behavior, dynamic instability behaviour, or some mixture of both. The mechanisms that control one or the other behavior are poorly understood but probably involve the tubulin isotype compositon of the microtubule poplulation, the degree of post-transaltional modification of tubulin, and, especially, the actions of regulatory proteins.” Applicants believe that, by causing the combination of one or more particular tubulin isotypes with a candidate therapeutic agent, one may affect the treadmiling behaviour and/or the dynamic instability behaviour of the microtubules which comrprise the tubulin isotype.” In particular, they believe that the magnetic anti-mitotic compound of their invention affects the treadmilling behavior and/or the dynamic instability behavior of microtubules.

[0109] As is disclosed on page 263 of the Jordan et al. article, a comprehensive review of tubulin isotypes and post-translational modifications is presented in an article by R. F. Luduena, “Multiple forms of tubulin: different gene productrs and covalent modifications,” Int. Rev. Cytology, 170: 207-275 (1998). The Jordan et al. article also refers to a work by P. Verdier-Pinard et al., “Direct analysis of tubulin expression in cancer cell lines by electrospray ionization mass spectrometery,” Biochemistry, 42: 12019-12027 (2003). According to the Jordan et al. article, “The Verider-Pinard et al. article describes analyses of tubulin isotypes, muations, and post-translational modifications by liquid chromatography/electrospray-ionization mass spectrometery in paclitaxel-sensivite and resistant cell lines.”

[0110] Referring again to the Jordan et al. article, it is disclosed that: “Dynamic instability and treadmilling behaviours can both be observed with purified microtubules in vitro. However, the rate and extent of both treadmilling and dynamc instability are relatively slow with purified microtubules compared with rates in cells. It is clear that microtubule dynamics in cells are regulated by a host of mechanisms: cells can alter their expression levels of 13 tubulin isotypes; they can alter their levels of tubulin post-translational modifications; they can express mutated tubulin; and they can alter the expression and phosphorylation levels of microtubule-regulatory proteins . . . that interact with the microtubule surfaceds and ends. Although microtubule dynamics can be modulated by the interaction of regulatory molecules with soluble tubulin itself, the assembled microtubule is likely to the the primary target of cellular molecules that regulate microtubule dynamics. The many drugs that modulate microtubule dynamics might be mimicking the actions of the numerous natural regulators that control microtubule dynamics in cells.” Applicants believe that the magnetic anti-mitotic compound of their invention is as effective as is paclitaxel in “ . . . mimicking the actions of the numerous natural regulators that control microtubule dynamics in cells . . . . ”

[0111] At page 255 of the Jordan et al. article, the authors disclose that “Microtubule dynamics are crucial to mitosis . . . . With the development of sophisticated methods for observing microtubule dynamics in living cells, it is now possible to visualize the dynamics of mitotic spindle microtubules. With these advances it has become clear that microtubles in mitotic spindles have uniquely rapid dynamics that are crucial to successful mitosis . . . During interphase, microtubules turn over (eschange their tubulin with the soluble tubulin pool) relatively slowly, with half-times that range from several minutes to several hours . . . . The interphase microtubule network disassembles at the onset of mitosis and is replaced by a new population of spindle microtubules that are 4-100 times more dynamic than the microtubules in the interphase cytoskeleton. Although there is variation among the various spindle-microtubule subpopulations, mitotic-spindle microtubules exchange their tubulin with tubulin in the soluble pool rapidly with half-times on the order of 10-30 seconds. . . . At least in some cells, the increase in dynamics seems to result from an increase in the catastrophe frequency, and a reduction in the rescue frequency rather than from changes in the inherent rate of growth and shortening.”

[0112] At page 256 of the Jordan et al. article, a “Table 1” is presented regarding “Antimitotic drugs, their diverse binding sites on tubulin and their stages of clinical development.” As is disclosed in such Table 1, one of the well-known binding domains on tubulin is the “vinca domain.”

[0113] One drug that binds at the vinca domain is Vinblastine (Velban), which is used to treat Hodgkins disease and testicular germ cell cancer. Reference may be had, e.g., to articles by G. C. Na et al. (“Thermodynamic linkage between tubulin self-association and the binding of vinblastine,” Biochemistry, 19: 1347-1354, 1980; and “Stoichiometry of the vinblastine self-induced self-association of calf-brain tubulin,” Biochem. Soc. Trans., 8: 1347-1354, 1980), by S. Lobert et al. (in Methods in Enzymology, Vol. 323, [ed. Johnson M.] 77-103 [Academic Press 2000]), and by A. Duflos et al. (“Novel aspects of natural and modified vinca alkaloids,” Curr. Med. Chem. Anti-Canc. Agents, 2: 55-70, 2002).

[0114] Another drug that binds at the vinca domain is Vincristine (Oncovin); it is used to treat leukemia and lymphomas. Reference may be had, e.g., to works by G. L. Plosker et al. (“Rituximab: a review of its use in non-Hodgkins lymphoma and chronic leukemia,” Drugs, 63: 803-843, 2003), by A. B. Sandler (“Chemotherapy for small cell lung cancer,” Semin. Oncol., 30: 9-25, 2003), and by J. O. Armitage et al. (“Overview of rational and individualized therapeutic strategies for non-Hodgkin's lymphoma,” Clin. Lymphoma, 3: S5-S11, 2002).

[0115] Another drug that binds at the vinca domain is Vinorelbine (Navelbine), which is used to treat sold tumors, lymphomas and lung cancer. Reference may be had, e.g., to works by J. Jassem et al. (“Oral vinorelbine in combination with cisplatin, a novel active regimen in advanced non-small-cell lung cancer,” Ann. Oncol. 14: 1634-1639, 2003), by A. Rossi et al. (“Single agent vinorelbine as first-line chemotherapy in elderly patients with advanced breast cancer,” Anticancer Res., 23: 1657-1664, 2003), and by A. D. Seidman (“Monotherapy options in the management of metastatic breast cancer,” Semin. Oncol., 30: 6-10, 2003).

[0116] Another drug that binds at the vinca domain is Vinflnine, which is used to treat bladder cancer, non-small-cell lung cancer, and breast cancer. Reference may be had to, e.g., the aforementioned article by A. Duflos et al., and to an article by T. Okouneva et al. on “The effects of vinflunine, vinorelbine, and vinblastine on centromere dynamics,” Cancer Ther., 2: 4.27-4.36, 2003.

[0117] Another drug that binds to the vinca domain is cryptophycin 52, and it is used to treat solid tumors. Reference may be had, e.g., to articles by D. Panda et al. (“Interaction of the antitumor compound cryptophycin 52 with tubulin,” Biochemistry, 39: 14121-14127, 2000), and by K. Kerksiek et al. (“Interaction of cryptophycin with tubulin and microtubules,” FEBS Lett., 377: 59-61, 1995).

[0118] A class of drugs that binds to the vinca domain of tubulin is the halichondrins (such as, e.g., E7389). Reference may be had, e.g., to articles by M. A. Jordan (“Mechanism of action of antitumor drugs that interact with microtubules and tubulin,” Curr. Med. Chem Anti-Cancer. Agents, 2: 1-17, 2002), by R. B. Bai et al. (“Halichondrin B and homohalichondrin B, marine natural products binding in the Vinca domain of tubulin. Discovery of tubulin-based mechanism of action by analysis of differential cytotoxity data,” J. Biol. Chem., 266: 15882-15889, 1991), by R. F. Luduena et al. (“Interaction of halichondrin B and homohalichondrin B with bovine brain tubulin,” Biochem. Pharmcol., 45: 4.21-4.27, 1993), and by M. J. Towle et al. (in in vitro and in vivo anticancer activities of synthetic macrocyclic ketone analogs of halichondrin B, Cancer Res., 61: 1013-1021, 2001).

[0119] Another class of drugs that bind to the vinca domain are the dolastatins (such as TZT-1027), which are used as a vascular targeting agent. Reference may be had, e.g., to an article by E. Harnel, “Natural products which interact with tubulin in the Vinca domain: maytarsine, rhizoxin, phomopsin A. Dolostatins 10 and 15 and halichondrin B.,” Pharmacol. Ther., 55:31-51, 1992.

[0120] Another class of drugs that bind to the vinca domain is the hemiasterlins (such as HTI-286). Reference may be had, e.g., to articles by R. Bai et al. (“Interactions of the sponge-derived antimitotic antipeptide hemiasterin with tubulin: comparison with dolastatin 10 and cryptophycin 1,” Biochemistry, 38: 14302-14310, 1999), and by F. Loganzo et al. (“HTI-286, a synthetic analogue of the tripeptide hemiasterin, is a potent antimicrotubule agent that circumvents P-glycoprotein-mediated resistance in vitro and in vivo,” Cancer Res., 63: 1838-1845, 2003).

[0121] Another of the binding sites mentioned in the 2004 Jordan et al. article (see Table 1) is the colchicine domain. One of the drugs that binds in the colchicine domain is colchicine, and it is used to treat non-neoplastic diseases such as gout and familial Mediterranean fever. Reference may be had, e.g., to articles by S. B. Hastie (“Interactions of colchicines with tubulin,” Pharmacol. Ther., 512: 377-401, 1991), and by D. Skoufias et al., “Mechanism of inhibition of microtubule polymerization by colchicines inhibitory potencies of unliganded cochicine and tubulin-colchicine complexes,” Biochemistry, 31: 738-746, 1992.

[0122] The combretastatins (AVE8062A, CA-1-P, CA-4-P, N-acetylcolchicinol-O-phosphate, ZD6126) are another class of drugs that bind at the coichicines binding site. Reference may be had to articles by G. M. Tozer et al. (“The biology of the combretastatins as tumor vascular targeting agent,” Int. J. Exp. Pathol., 83: 21-38, 2002), and by E. Harnel et al. (“Antitumor 2,3-dihydro-2-(aryl)-4(1H) quinazolinone derivatives: interactions with tubulin,” Biochem. Pharmacol., 51: 53-59, 1996).

[0123] Another class of drugs that bind to the colchicines domain is the methoxybenzene-sulphonamides (such as ABT-751, E7010, etc.) that are used to treat solid tumors. Reference may be had, e.g., to an article by K. Yoshimatsu et al., “Mechanism of action of E7010, an orally active sulfonamide antitumor agent: inhibition of mitosis by binding to the colchicines site of tubulin,” Cancer Res., 57: 3208-3213, 1997).

[0124] As is also disclosed in Table 1 of the 2004 M. A. Jordan et al. article, the taxane site is another well known tubulin binding site. Taxanes (such as paclitaxel) bind at this site and are used to treat ovarian cancer, breast cancer, lung cancer, Kaposi's sarcoma, and many other tumors. Reference may be had, e.g., to articles by S. B. Horwitz (“How to make taxol from scratch,” Nature, 367: 593-594, 1994), by J. Manfredi et al.(“Taxol binds to cell microtubules,” J. Cell. Biol., 94: 688-696, 1982), by J. Parness et al. (“Taxol binds to polymerized tublulin in vitro,” J. Cell. Biol., 91: 479-487, 1981), and by J. F. Diaz et al. (“Assembly of purified GDP-tubulin into microtubules induced by taxol and taxotere: reversibility, ligand stoichiochemistry, and competition,” Biochemistry, 32: 2747-2755, 1993.).

[0125] Docetaxel (Taxotere) is another drug that binds to the taxane site; and it is used to treat prostrate, brain, and lung tumors. Reference may be had, e.g., to articles by C. P. Belani et al.(“TAX 326 Study Group: First-line chemotherapy for NSCLC: an overview of relevant trials,” Lung Cancer, 38 (Suppl. 4): 13-19, 2002), and by F. V. Fosella et al. (“Second line chemotherapy for NSCLC: establishing a gold standard,” Lung Cancer, 38, 5-12, 2002).

[0126] The epothilones (such as BMS-247550, epothilones B and D) are other drugs that bind to the taxane site; they are used to treat paclitaxel-resistant tumors. References may be had, e.g., to articles by D. M. Bolag et al. (“Epothilones: a new class of microtubule-stabilizing agents with a taxol-like mechanism of action,” Cancer Res., 55: 2325-2333, 1995), by M. Wartmann et al. (“The biology and medicinal chemistiry of epothilones,” Curr. Med. Chem. Anti-Cancer Agents, 2: 123-148, 2002), by F. Y. Lee et al.(“BMS-247550: a novel epothilone analog with a mode of action similar to apcitaxel but possessing superior antitumour efficacy,” Clin. Cancer Res., 7: 1429-1437, 2001), and by K. Kamath et al. (“Suppression of microtubule dynamics by epothilone B in living MCF7 cells,” Cancer Res., 63: 6026-6031, 2003).

[0127] There are other microtubule binding sites disclosed in Table 1 of the 2004 Jordan et al. publication. Thus, e.g., it is disclosed that estramustine is used to treat prostrate cancer. Reference may be had, e.g., to articles by D. Panda et al. (“Stabilizatio of microtubule dynamics by estramustine by binding to a novel site in tubulin: a possible mechanistic basis forits antitumor action,” Proc. Nat. Acad. Sci USA94: 10560-10564, 1997), by O. Smaletz et al. (“Pilot study of epothilone B analog [BMS-247550] and estramustine phosphate in patients with progressive metastatic prostrate cancer following castration,” Ann. Oncol., 14: 1518-1524), by W. Kelly et al. (“Dose escalation study of intraveneous extramstine phosphate in combination with Paclitaxel and Carboplatin in patients with advanced prostate cancer,” Clin. Cancer Res. 9: 2098-2107, 2003), by G. Hudes et al. (“Phase 1 clinical and pharmacologic trial of intraveneous estramustine phosphate,” J. Clin. Oncol., 20: 1115-1127, 2002), and by B. Dahllof et al. (“Estramustine depolymerizes microtubules by binding to tubulin,” Cancer Res. 53, 4573-4581, 1993).

[0128] Referring again to the Jordan et al. article, and at page 256 thereof, the criticality of “highly dynamic microtubules” is discussed. It is disclosed that: “Mitosis in most cells progresses rapidly and the highly dynamic microtubules in the spindle are required for all stages of mitosis. First, for the timely and correct attachment of chromosomes at their kinetochoares to the spindle during prometaphase after nuclear-envelope breakdown . . . . Second, for the complex movements of the chromosomes that bring them to their properly aligned positons at the metaphase plate . . . . Last, for the synchronous separation of the chromosomes in anaphase and telophase after the metaphase . . . . During prometaphase, microtubules emanating from each of the two spindle poles make vast growing and shortening excursions, essentially probing the cytoplasm until they ‘find’ and become attached to chromosomes at their kinetocores . . . . Such microtubules must be able to grow for long distances . . . then shorten almost completely, then re-grow again, until they successfully become attached. The presence of a single chromosome that is unable to achieve a bipolar attachment to the spindle is sufficient to prevent a cell from transitioning to anaphase; the cell then remains blocked in a prometaphase/metaphase like state and eventually undergoes apoptosis (programmed cell death). . . . We have found that suppression of microtubule dynamics by drugs such as paclitaxel (Taxol) and Vinca alkaloids seems to be a common mechanism by which these drugs block mitosis and kill tumour cells. Human osterosarcoma cells after inclubation with . . . paclitaxel and . . . vinflunine are shown. Many chromosomes are stuck at the spindle poles, unable to congress to the metaphase plate. At least one reason that cancer cells are relatively sensitive to these drugus compared to normal cells is that cancer cells divide more freuqenlty than normal cells and thereofore frequently pass though a stage of vulnerability to mitotic poisons.”

[0129] The anti-mitotic drugs may also interfere with “oscillations.” As is disclosed at page 257 of the Jordan et al. article, “During metaphase in the absence of drugs . . . the duplicated chromosomes, which are attached to the microtubules at their kinetohores, oscillate back and forth under high tension in the spindle equatorial region in concert with growth and shortening of the attached microtubles . . . . Superimposed on these oscillations, tubulin is continuously and rapidly added to microtubles at the kinetochores and is lost at the poles in a balanced fashion(that is, the microtubules treadmill); . . . . The oscillations are believed to be required for th proper functioning of the spindle. The absence of tension on the chromosomal kinetochores is also sufficient to block cell-cycle progress from metaphase to anaphase . . . . In apanphase . . . , microtubules that are attached to chromosomes must undergo a carefully regulated shortening at that same time that another propotion of spindle microtubles (the interpolar microtubules) lengthens.”

[0130] Anti-mitotic drugs interfere with these “microtubule dynamics” in different ways. As is disclosed at page 257 of the Jordan et al. article, “ . . . a large number of chemically diverse substances bind to soluble tubulin and/or directly to tubulin in the microtubules.” In one embodiment, the magnetic anti-mitotic drugs of this invention bind directly to soluble tubulin. In another embodiment, the magnetic anti-mitotic drugs of this invention binid to the polymerized tubulin in the microtubules.

[0131] As is also disclosed in the Jordan et al. article, “Most of these compounds are antimitotic agents and inhibit cell proliferation by actring on the polymerization dynamics of spindle microtubles, the rapid dynamics of which are essential to proper spindle function.” In one embodiment, the magnetic anti-mitotic compounds of this invention act on the polymerization dynamics of the spindle microtubules.

[0132] As is also disclosed in the Jordan et al. article, “The specific effects of individual microtubule-targeted drugs on the microtubule polymer mass and on the stability and dynamics of the microtubules are complex. Microtubule-targeted antimitoitic drugs are usually classified into two main groups. One group, known as the microtubule-destabilizing agents, inhibits microtubule polymerization at high concentrations . . . . ” In one embodiment, the magnetic anti-mitotic compounds of this invention inihibit microtubule polymerization at high concentrations.

[0133] As is also disclosed in the Jordan et al. article, “The second main group is known as the microtubule stabilizing agents. These agents stimulate microtubule polymerization and include paclitaxel . . . docetaxel . . . the epothilones, discodermolide . . . and certain steroids . . . . ” In one embodiment, the magnetic anti-mitotic compounds of this invention stimulate microtubule polymerization.

[0134] As is also disclosed in the Jordan et al. article, “The classification of drugs as microtubule ‘staiblizers’ or ‘destabilizers’ is overly simplistic . . . . The reason . . . is that drugs that increase or decrease microtubule polymerization at high concentrations powerfully suppress microtubule dynamics at 10-100 fold lower concentrations and, therefore, kinetically stabilize the microtubules, without changing the microtubule-polymer mass. In other words, the effects of the drugs on dynamics are often more powerful than their effects on polymer mass. It was previously thought that the effects of the two classes of drugs on microtubule-polymer mass were the most important actions resonsbile for their chemotherapeutic properties. However, the drugs would have to be given and maintained at very high dosage levels to act primarily and continuously on microtubule-polymer mass. It now seems that the most important action of these drugs is the suppression of spindle-microtubule dynamics, which results in the slowing or blocking of mitosis at the metaphase—anaphase transition and induction of apoptioic cell death.” In one embodiment, the magnetic properties of applicants' anti-mitotic compounds result in the slowing or blocking of mitosis at the metaphase—anaphase transition.

[0135] As is also disclosed in the Jordan et al. article, “The microtubule-targeted drugs affect microtubule dynamics in several different ways. To suppress microtubule dynamics for a significant time, the drugs must bind to and act directly on the microtubule. For example, a drug that suppresses the shortening rate at microtubule ends must bind directly to the microtubule, either at its end or along its length . . . many drugs also act on soluble tubulin, and the relatively ability of a given drug to bind to soluble tubulin or directly to the microtubule, and the location of the specific binding site in tubulin and the microtubule, greatly affect the response of the microtubule system to the drug.”

[0136] At page 258 of the Jordan et al. article, the mechanism by which Vinca alkaloids kills cancer cells is discussed. It is stated that: “Tubulin and microtubules are the main targets of the Vinca alkaloids . . . , which depolymerize microtubles and destroy mitotic spindles at high concentrations . . . , therefore leaving the dividing cancer cells blocked in mitosis with condensed chromosomes. At low but clinically relevant concentrations, vinbalstine does not depolymerize spindle microtubules, yet it powerfully blocks mitosis . . . . and cells die by apoposis. Studies form our laboratory . . . indicate that the block is due to suppression of microtubule dynamics rther than microtubule depolymerization . . . . Vinblastine binds to the beta-submit of tublin dimmers at a distict region called the Vinca-binding domain. Various other novel chemotherapeutic drugs also bind at this domain . . . . The binding of vinblastine to sulbue tubulin is rapid ad reversible . . . . Importantly, binding of vinblastine induces a conformational change in tubulin in connection with tubulin self-association . . . The ability of vinlastine to increase the affinity of tubulin for itself probably has a key role in the ability of the drug to stabilize microtubules kinetically.”

[0137] The degree to which vinblastine binds to tubulin depends upon whether the tubulin is “exposed” or “buried.” As is also disclosed in the Jordan et al. article, “Vinblastine also binds directly to microtubules. In vitro, vinblastine binds to tubulin at the extreme microtubule ends . . . with very high affinity, but it binds with markedly reduced affinity to tubulin that is brued in the tubulin lattice . . . . Remarkably, the binding of one or two molecules of vinblastine per microtubule plus end is sufficient to reduce both treadmilling and dynamic instability by about 50 percent without causing appreciable microtubule depolymerization.”

[0138] By comparison, the taxanes bind poorly to soluble tubulin. As is also disclosed in the Jordan et al. article, “The taxanes bind poorly to soluble tubulin itself, but instead bind directly with high affinity to tubulin along the length of the microtubule . . . . The biding site for paclitaxel is in the beta-subunit, and its location, which is on the inside surface of the microtubule, is known with precision . . . . Paclitaxel is thought to gain access to its binding sites by diffusing through small openings in the microtubules or fluctuations in the microtubule lattice. Binding of paclitaxel to its site on the inside microtubule surface stalbilizes the microtubule and increases microtubule polymerization, presumably by inducing a conformational change in the tubulin that, by an unkown mechanism, increases its affinity for neighboring tubulin molecules.” In one preferred embodiment of this invention, a preferred magnetic anti-mitotic compound of the invention binds well to soluble tubulin.

[0139] Even relatlively small amounts of paclitaxel will stabilize the microtubules. As is disclosed in the Jordan et al. article, “There is one paclitaxel binding site on very molecule of tublin in a microtubule and the ability of paclitaxel to increase microtubule polymerization is associated with nearly 1:1 stoichiometric bind of paclitaxel to tubulin in microtubules So if a typical microtubule consists of approximately 10,000 tubulin molecules, then the ability of paclitaxel to increase microtubule polymerization requires the binding of about 5,000 packlitaxel molecules per microtubule. However, in contrast with the large number of molecules that are required to increase microtubule polymerization, we found that binding of a very small number of molecules stabilizes the dynamics of the microtubules without increasing microtubule polymerization.” Support for this statement in the article was a work by W. B. Derry et al., “Substoichiometric binding of taxol suppresses microtubule dynamics,” Biochemistry, 34: 2203-2211, 1995.

[0140] As is also disclosed in the Jordan et al. article, “ . . . just one paclitaxel molecule bound per several hundred tubulin molecules in a microtubule can reduce the rate of microtubule shortening by about 50 percent. Suppression of microtubule dynamics by paclitaxel leads to mitotic block in the absence of significant microtubule bundling.” Basis for this statement was an article by A. M. Yvon et al., “Taxol suppresses dynamics of individual microtubules in living human tumor cells,” Mol. Biol. Cell, 10:947-949, 1999. This Yvon et al. artricle was the “first demonstration that suppression of microtubule dynamics in living cells by low concentrations of paclitaxel correlates with mitotic block.”

[0141] As is also disclosed in the Jordan et al. article, “ . . . the suppression of spindle-microtubule dynamics prevents the dividing cancer cells from progressing from metaphase into anaphase and the cells eventually die by apoptosis.” As basis for this statement, articles were cited by M. A. Jordan et al. (“Mitotic block induced in HeLa cells by low concentrations of paclitaxel [Taxol] results in abnormal mitotic exit and apoptotic cell death,” Cancer Res., 56: 816-825, 1996), by Yvon et al. (“Taxol suppresses dynamics of individual microtubules in living human tumor cells, Mol. Biol. Cell, 10: 947-949, 1999), and by J. Kelling et al. (“Suppression of centromere dynamics by taxol in Iving osteosarcoma cells,” Cancer Res., 63: 2794-2801, 2003).

[0142] The Jordan et al. article also discusses the mechanism by which colchicines exerts its anti-mitotic effects. At pages 260 et seq., it discloses that: “The interaction of colchicines with tubulin and microtubules presents yet another variation in the mechanisms by which microtubule-active drugs inhibit microtubule function. As with the Vinca alkaloids, colchicines depolymerizes microtubles at high concentrations and stabilizes microtubule dynamics at low concentrations. Colchicine inhibits microtubule polymerization substoichiometrically (at concentrations well below the concentration of tubulin that is free in solution . . . . ” In support of this statement, the Jordan et al. article cites an article by L. Wilson et al. (in Microtubules [eds. J. S. Hymans et al.], 59-84 [Wiley-Liss, New York, N.Y., 1994]).

[0143] As is also disclosed in the Jordan et al. article, “ . . . colchicine itself does not bind directly to microtubule ends. Instead, it first binds to soluble tubulin, induces slow conformational changes in the tubulin and ultimately forms a poorly reversible final state tubulin-colchicine complex . . . which then copolymerizes into the microtubule ends in small numbers along with large numbers of free tubulin molecules.”

[0144] The Jordan et al. article discloses that the tubulin-colchicine complexes must bind more tightly to tublin that tubulin itself does, stating that: “Tubulin colchicines complexes might have a conformation that disrupts the microtubule lattice in a way that slows, but does not prevent, new tubulin addition. Importantly, the incorporated tubulin-colchicine complex must bind more tightly to its tubulin neighbors than tubulin itself does, so that the normal rate of tubulin dissociation is reduced.”

[0145] As is also disclosed in the Jordan et al. article, “So, despite the differences between the effects at high concentrations of the Vinca/colchicines-like drugs and the taxane-like drugs, nearly all of the microtubule-targeted antimitotic drugs stabilize microtubule dynamics at their lowest effective concentrations. Stabilization of microtubule dynamics correlates with blocking of the cell cycle at mitosis and in senstivie tumour cells, ultimately resulting in cell death by apoptosis. Therefore, the most potent mechanism of nearly all of the microtubule—targeted drugs seems to be the stabilization of dynamics of mitotic spindle microtubles.”

[0146] In one preferred embodiment of this invention, the antimitotic compounds of this invention inhibit the process of angiogenesis (the formation of new blood vessels). In another embodiment of this invention, the antimitotic compounds of this invention shut down the existing vasulature of tumors.

[0147] Prior art compositions that have these antivascular effects have been reported. Thus, as is disclosed at page 260 of the 2004 Jordan et al. article, ““The tumour vasculature is a relatively attractive new target for cancer therapy. The vasculature is easily accessible to blood-borne therapeutic agents, and tumour cells generally die rapidly unless they are supplied with oxygen and nutrients through the blood. There are two types of approaches to inhibiting vascular function. One . . . is the search for agents that inhibit the process of angiogenesis—the formation new blood vessels. However, more recently, the ability of several compounds, especially microtubule-targeted agents, to rapidly shout down existing turmour vasculature has been recognized . . . . ” In support of this last statement, the Jordan et al. article cited an article by G. M. Tozer et al. on “The biologcy of the combretastatins as tumouor vascular targeting agents,” Int. J. Exp. Pathol., 83: 21-38 (2002).

[0148] As is also disclosed in the 2004 Jordan et al. article, “Since the late 1990s, the combestatins and N-acetylcolchicinol-O-phosphate, compounds that resemble colchicines and bind to the colchicines domain on tubulin, have undergone extensive development as antivascular agents . . . . When vascular targeting agents . . . are added to cultures of endothelial cells . . . , the microtubules rapidly depolymerize, the cells become round within minutes, undergo blebbing and detaching from the substrate, actin stress fibres form (presumably as a result of signaling from the depolymerizing microtubule cytoskeleton), and the cells die with no evidence of apoptosis.” As support for this latter statement, the 2004 Jordan et al. article cited a work by C. Kanthou et al., “The tumor vascular targeting agent combretastatin A-4 phosphate induces reorganization of the actin cytoskeleton and early membrane blebbing in human endothelial cells,” Blood, 99: 2060-2069 (2002).

[0149] As is also disclosed in the 2004 Jordan et al. article, “The process of vascular shutdown can be observed in rats through windowed chambers that are implanted subcutaneously. This indicates that a primary and marked effect of vascular-targeting agents is an extremely rapid reduction of blood flow to the interior of solid tumours, often within 5 minutes of administering the drug to the aminal. Within 1 hour, the red-cell velocity might drop to less than 5 percent of the starting value.” As support for this statement, the 2004 Jordan et al. article cited a work by G. M. Tozer et al. on “Mechanisms associated with tumor vascular shut-down induced by combretastatin A-4 phosphate: intravital miscroscopy and measurement of vascular permeability,” Cancer Res., 61: 6413-6422 (2001).

[0150] The anti-vascular agents cause small blood vessels to disapper, blood flow to slow, red blood cells to aggregate in stacks or “rouleaux,” hemorrhaging from peripheral tumor vessels to occur, vascular permeability to increase, and the death of interior tumor cells by necrosis. See, e.g., an article by G. M. Tozer et al., “The Biology of the combretastatins as tumor vascular targeting agents,” Int. J. Exp. Pathol, 83: 21-38 (2002).

[0151] As is also disclosed in the 2004 Jordan et al. article, “ . . . the vascular-targeting aents that are now under development seem to damage tumour vasculature without significantly harming normal tissues . . . . ” The Jordan et al. article, as support for this statement, cites work by V. E. Prise et al., reported in “The vascular response of tumor and normal tissues in the rat to the vascular targeting agent combretastatin A-4 phosphate, at clinically relevant doses,” Int. J. Oncol. 21: 717-726 (2002). In one embodiment, the magnetic anti-mitotic compound of this invention damages tumors without significantly harming normal tissues.

[0152] As is also disclosed in the 2004 Jordan et al. article, “The source of this specificity is not known, but has been suggested to be attributable to differences between the mature vasculature of normal tissues and the immature or forming vasculature of tumors. There are suggestions that endothelial cells of immature vasculature could have a less well-developed actin cytoskeleton that might make the cells more susceptible to collapse.” The basis for this statement was an article by P. D. Davis et al., “ZD6126: A novel vascular-targeting agent that casues selective destruction of tumor vasculature,” Cancer Res. 62: 7247-7253 (2003).

[0153] As is also disclosed in the 2004 Jordan et al. article, “ . . . more sluggish or more variable blood flow in tumour vasculature might make the tumour vessels particularly susceptible to damaging agents. Differences in rates of endothelial-cell proliferation, in post-translational modifications of tubulin, and in interactions between actin and microtubules might also contribute to the specificity of vasclualr targeting agents.”

[0154] At page 261 of the 2004 Jordan et al. article, tumor sensitivity and resistance are discussed. It is disclosed that: “Among the most important unsolved questions about the antitumour activities of microtubule-targeted drugs concerns the basis of their tissue specificities and the basis for the development of drug resistance to these agents. For example, it is not known why paclitaxel is so effective against ovarian, mammary and lung tumours, but essentially ineffective against many other solid tumours, such as kidney or color carcinomas and various sarcomas. Similarly, for the Vinca alkaloids, it is unclear why they are frequently most effective against haematological cancers, but often ineffective against many solid tumors. There are clearly many determinants of sensitivity and resistance to antimitotic drugs, both at the level of the cells themselves and at the level of the pharmacological accessibility of the drugs to the tumour cells.” As authority for these statements, the 2004 Jordan et al. article cited work by C. Dumontet et al., “Mechanisms of action of and resistance to antitubulin agents: microtubule dynamics, drug transport, and cell death,” J. Clin. Oncol., 17: 1061-1070 (1999).

[0155] As is also disclosed in the 2004 Jordan et al. article, “the “ultimate failure or inherent resistance to chemotherapy with antimitotic drugs often results from overexpression of a class of membrane transporter proteins known as ABC-transporters(ATP-dependent drug efflux pumps or ATP-binding cassettes). These membrane pumps produce decreased intracellular drug levels and lead to cross-resistance (multidrug resistance) . . . to drugs of different chemical structures, such as paclitaxel and Vinca alkaloids. The first of many identified was P-glycoprotein, the product of the human MDRI gene.” As support for these statements, the 2004 Jordan et al. article cited work by S. V. Ambudkar et al., “P-glycoprotein: from genomics to mechanism,” Oncogene, 22: 7468-7485 (2003).

[0156] In one preferred embodiment, the magnetic anti-mitotic compound of this invention is not removed by these membrane pumps. It should be noted that, as is reported by the 2004 Jordan et al. article, “Considerable efforts are underway to understand these mechanisms of resitance, to develop P-glycoprotein inhibitors and to develop microtubule-targeted drugs that are not removed by these pumps. As authority for these statements, the 2004 Jordan et al. article cited works by S. V. Ambdukar et al. (see the citation in the preceding paragraph), by A. R. Safa (“Identification and characterization of the binding sites of P-glycoprotein for multidrug-resistance-related drugs and modulators,” Curr. Med. chem. Anti-Canc. Agents, 4: 1-17, 2004), by H. Thomas et al. (“Overcoming multidrug resistance in ancer: an udate on the clinical strategy of inhibiting P-glycoprotein,” Cancer Control, 10: 159-165, 2003), and by R. Geney et al. (“Overcoming multidrug resistance in taxane chemotherapy,” Clin. Chem. Lab. Med., 40: 918-925, 2002).

[0157] The 2004 Jordan et al. article discusses the role of specific tubulin isotypes in multidrug resitance. At page 262 of the article, it is stated that: “However, in addition, cells also have many microtubule-related mechanisms that confer resistance or determine intrinsic insensivity to antimitotic drugs.” As support for these statements, the Jordan et al. article cites an article by G. A. Orr et al. (“Mechanisms of taxol resistance related to microtubules,” Oncogene, 22: 7280-7295, 2003) which is a comprehensive review of microtubule-related mechanisms of paclitaxel resistance. The article also cites works by M. Kavallaris et al.(“Multiple microtubule alterations are associated with Vinca alkaloid resistance in human leukemia cells,” Cancer Res, 61: 5803-5809, 2001), by A. M. Minotti et al. (“Resistance to antimitotic drugs in Chinese hamster overay cells correlated with changes int eh level of polymerized tubulin,” J. Biol. Chem., 266: 3987-3994, 1991), by S. W. James et al. (A mutation in the . . . tubulin gene of Chlamydomonas reinhardtii confers resistance to anti-microtubule herbicides,” J. Cell Sci. 106: 209-218, 1993), by W. P. Lee et al. (“Purification and characterization of tublin form parental and vincristine-resistant HOB1 lymphoma cells,” Arch. Biochem. Biophys. 319: 498-503, 1995), by S. Ohta et al. (“Characterization of a taxol-resistant human small-cell lung cancer cell line,” Jpn. J. Cancer Res., 85: 290-297, 1994), and by N. M. Laing et al. (“Amplification of the ATP-binding cassette 2 transporter gene if unctionally linked with enhanced efflux of estramustine in overian carcinoma cells,” Cancer Res., 58: 1332-1337, 1998.)

[0158] In one preferred embodiment of this invention, the magnetic anti-mitotic compound of this invention binds to, and inactivates, a tubulin isotype that causes, or tends to cause, drug-resistance.

[0159] As is also disclosed in the 2004 Jordan et al. article, “Microtubule polymer levels and dynamics are regulated by a host of factors, including expression of regulatory proteins, post-translational modifications of tubulin and extression of different tubulin isotypes. The levels of each of these isotpypes differ among tissue and cell types, and there are numerous examples of changes in their levels that correlate with development of resistance of paclitaxel or Vinca alkaloids and other microtubule-targeted drugs.” In support of these statements, the Jordan et al. article cited works by C. M. Galmarini et al. (“Drug resistance associated with loss of p53 involves extensive alterations in microtubule composition and dynamics,” Br. J. Cancer, 88: 1793-1799, 2003), by C. A. Burkart et al. (“The role of beta-tubulin isotpyes in resistance to antimitotic drugs,” Biochim. Biophys. Acta, 2: 01-09, 2001), by C. Dumontet et al. (“Resistance to microtubule-targeted cytotoxins in a K562 leukemia cell variant is associated with altered tubulin expression,” Elec. J. Oncol., 2: 33-44, 1999), by P. Giannakakou et al. (“A common pharmacophore for epothilone and taxanes: molecular basis for drug resistance conferred by tubulin mutations in human cancer cells, Proc. Natl. Acad. Sci USA, 97: 2904-2090, 2000), by A. Goncalves et al. (“Resistance to taxol in lung cancer cells associated with increased microtubule dynamics,” Proc. Natl. Acad. Sci USA, 98:11737-11741, 2001), by M. Haber et al. (“Altered expression of M32, the class II beta-tubulin isotype, in a murine J774.2 cell line with a high level of taxol resistance,” J. Biol. Chem., 270: 31269-31275, 1995), by J. P. Jaffrezou et al. (“Novel mechanism of resistance to paclitaxel in human K562 leukemia cells by combined selection with PSC833,” Oncology Res., 7: 512-517, 1995), and by M. Kavallaris et al. (“Taxol-resistant epithelial ovarian tumors are associated with altered expression of specific beta-tubulin isotypes),: J. Clin. Invest. 100: 1-12, 1997. In one embodiment, the “ . . . specific beta-tubulin isotypes” that are preferentially expressed by malignant cells are preferentially bound to (and inactivated) by the magnetic, anti-mitotic compound of this invention, as is more fully discussed elsewhere in this specification.

[0160] As is also disclosed in the 2004 Jordan et al. article, “ . . . subtle suppression of microtubule dynamics by paclitaxel, vinblastine or other antimitotic drugs, without any attendant change in the microtubule-polymer mass, prevents progress through the cell cycle from metaphase to anaphase in sensitive cells. Changes in microtubule dynamics can lead to altered sensitivity to microtubule-targeted drugs. In one well studied case of paclitaxel resistance, resistant and paclitaxel-depedent A549 lung cancer cells had inherently faster microtubule dynamics following withdrawal of paclitaxel than sensitive cells . . . . ” As support for this statement, the article cited work by A. Goncalves et al., reported in “Resistance to taxol in lung cancer cells associated with increased microtubule dynamics,” Proc. Natl. Acad. Sci. USA, 98:11737-11747, 2001.”

[0161] As is also disclosed in the 2004 Jordan et al. article, “In the absence of paclitaxel, the paclitaxel-resistant/dependent cells with the faster microtubule dynamics were unable to progress from metaphase to anaphase and their spindles became disorganized. So, these cells were resistant to paclitaxel and also dependent on paclitaxel to slow their dynamics and allow them to go through mitosis successfully. The inherent sensititivy of cells to subtle changes in microtubule dynamics means that there are numerous ways for cells to become resistant to microtubule-targeted drugs. In the case of the paclitaxel-resistant A549 cells discussed above, the mechanisms of increased dynamics seem to involve several changes. The resistant cells overexpress one of the isotypes of tubulin, BIII-tubulin.” As support for this last statement, the 2004 Jordan et al. article cited works by M. Kavallaris et al. (“Antisense oligonucleotides to class III beta-tubulin sensitive drug-resistant cells to taxol,” Br. J. Cancer, 80: 1020-1025, 1991), by L. A. Martello et al. (“Taxol and discodermolide represent a synergistic drug combination in human carcinoma cell lines,” Clin. Cancer Res., 6: 1978-1987, 2000), and another article by Martello et al. (“Elevated levels of microtubule-destabilizing factors in a taxol-resistant A549 cell line with a alpha-tubulin mutation,” Cancer Res., 63: 1207-1213, 2003. In one embodiment of this invention, the anti-mitotic compound of this invention is used to bind with, and inactivate, the beta-tubulin isotype(s) expressed by the drug-resistant cancer cells.

[0162] As is also disclosed in the 2004 Jordan et al. article. “In addition, they have a heterozygous point mutation in alpha-tubulin and they overexpress the ative form of the microtubule-destabilizing protein stahmin and the inactive form of the putative microtubule stabiling protein MAP 4 . . . . ”

[0163] As is also disclosed in the 2004 Jordan et al. article, “ . . . drug resistance might involve some of the ther forms of tubulin . . . that associate with the centrosomes in intrphase and with the spindle poles in mitotic cells.” In one embodiment of this invention, the anti-mitotic compound of this invention binds to, and inactivates, one or more of these other forms of tubulin.

[0164] As is also disclosed in the 2004 Jordan et al. article. “The fact that antimitotic drugs bind to many diverse sites on tubulin and microtubles mean that clinical combinations of two or more of these drugs have the potential to improve efficiency and reduce the side effects of therapy.” In one embodiment of this invention, the actions of two or more separate chemotherapeutic agents are combined into one compound or composition. In another embodiment, the anti-mitotic compound of this invention is administered with another chemotherapeutic agent, prior to the administration of another chemotherapeutic agent, or after the administration of another chemotherapeutic agent. This embodiment is discussed elsewhere in this specification.

[0165] As is also disclosed in the 2004 Jordan et al. article, “The discovery of the synergistm of paclitaxel with discodermolide is particularly interesting, as both drugs bind to the same or overlapping sites on tubulin or microtubules.” In one embodiment, the magnetic, anti-mitotic compound of this invention binds to the same or averlapping sites on tubulin or microtubules as does paclitaxel.

[0166] Many of the matters disclosed in the 2004 Jordan et al. article regarding tubulin isotype are also disclosed in the patent literature.

[0167] By way of illustration, U.S. Pat. No. 5,888,818, the entire disclosure of which is hereby incorporated by reference into this specification, claims “An isolated DNA encoding an .alpha.- or gamma.-tubulin, which tubulin is resistant to an anti-tubulin agent selected from the group consisting of dinitroanaline, phosphorothioamidate and chlorthal dimethyl, the resistant tubulin comprising a non-polar amino acid instead of a threonine residue at a position corresponding to that depicted as position 239, 237, or 240 in Table 2.” At columns 1 et seq. of such patent, an excellent discussion of microtubules and tubulin isotypes is presented.

[0168] Thus, as is disclosed in U.S. Pat. No. 5,888,818, “Almost all eukaryotic cells contain microtubules which comprise a major component of the network of proteinaceous filaments known as the cytoskeleton. Microtubules thereby participate in the control of cell shape and intracellular transport. They are also the principal constituent of mitotic and meiotic spindles, cilia and flagella. In plants, microtubules have additional specialized roles in cell division and cell expansion during development.”

[0169] As is also disclosed in U.S. Pat. No. 5,888,818, “In terms of their composition, microtubules are proteinaceous hollow rods with a diameter of approximately 24 nm and highly variable length. They are assembled from heterodimer subunits of an .alpha.-tubulin and a β-tubulin polypeptide, each with a molecular weight of approximately 50,000. Both polypeptides are highly flexible globular proteins (approximately 445 amino acids), each with a predicted 25% .alpha. helical and 40% β-pleated sheet content. In addition to the two major forms (.alpha.- and β-tubulin), there is a rare .gamma.-tubulin form which does not appear to participate directly in the formation of microtubule structure, but rather it may function in the initiation of microtubule structure.”

[0170] As is also disclosed in U.S. Pat. No. 5,888,818, “In all organisms, the multiple .alpha.- and β-tubulin polypeptides are encoded by corresponding families of .alpha.- and β-tubulin genes, which are located in the nuclear genome. Many such genes (or corresponding cDNAs) have been isolated and sequenced. For example, maize has approximately 6 .alpha.-tubulin genes and approximately 8 β-tubulin genes dispersed over the genome (Villemur et al, 1992, 34th Maize Genetics Symposium). Some of the .alpha.-tubulin genes from maize have been cloned and sequenced (Montoliu et al, 1989, Plant Mol Biol, 14, 1-15; Montoliu et al, 1990, Gene, 94, 201-207; Villemur et al, 1992, J Mol Biol, 227:81-96), as have some of the β-tubulin genes (Hussey et al, 1990, Plant Mol Biol, 15, 957-972). Comparison of amino acid sequences of the three documented maize .alpha.-tubulins indicates they have 93% homology. Maize β-tubulins exhibit 38% identity with these .alpha.-tubulins. In segments of divergence between the .alpha.- and β-tubulin amino acid sequences, homology ranges from 13% to 17%. Homology between the three .alpha.-tubulin amino acid sequences within these same .alpha.-/β-divergence regions ranges from 77% to 96%.”

[0171] As is also disclosed in U.S. Pat. No. 5,888,818, “Sequence information on the various tubulin forms shows that throughout evolution the protein domains involved in polymerization have been highly conserved, and interspecies amino acid sequence homology is generally high. For example, the four β-tubulin isotypes in human are identical with their counterparts in mouse. There is 82-90% homology between mammalian neuronal or constitutively expressed tubulins and algal, protozoan and slime mould tubulins. Considering plant sequences in more detail, there are long stretches in which the amino acid sequence of all the .alpha.- and β-tubulins are identical (Silflow et al, 1987, Developmental Genetics, 8, 435-460). For example, the 35 amino acids in positions 401-435 are identical in all plant .alpha.-tubulins, as are the 41 amino acids in the region between positions 240 and 281 in the plant β-tubulins. Conservation of amino acid residues is approximately 40% between the .alpha.- and β-tubulin families, and 85-90% within each of the .alpha.- and β-tubulin families. It should be noted that in general, most .alpha.-tubulins are 1 to 5 residues larger that the β-tubulins.”

[0172] U.S. Pat. No. 5,888,818 then goes on to discuss anti-tubulin agents, stating that: “The economic interest of tubulins lies in the effect of certain agents which interfere with tubulin structure and/or function. Such agents (including non-chemical stresses) are hereinafter referred to as ‘anti-tubulin agents’ as they share a similar type of mode of action. Extreme conditions are known to destabilize the tubulins and/or microtubules. Such conditions include cold, pressure and certain chemicals. For example, Correia (1991, Pharmac Ther, 52:127-147) describes .alpha.- and β-tubulin interactions, microtubule assembly and drugs affecting their stability. Some anti-tubulin agents are often called ‘spindle poisons’ or ‘antimitotic agents’ because they cause disassembly of microtubules which constitute the mitotic spindle. For at least one hundred years, it has been known that certain chemical agents arrest mammalian cells in mitosis, and of these agents the best known is colchicine which was shown in the mid-1960s to inhibit mitosis by binding to tubulin. Many of these anti-tubulin agents have since found widespread use as cancer therapeutic agents (eg vincristine, vinblastine, podophyllotoxin), estrogenic drugs, anti-fungal agents (eg griseofulvin), antihelminthics (eg the benzimidazoles) and herbicides (eg the dinitroanilines). Indeed some of the specific agents have uses against more than one class of organism. For example, the dinitroaniline herbicide trifluralin has recently been shown to inhibit the proliferation and differentiation of the parasitic protozoan Leishmania (Chan and Fong, 1990, Science, 249:924-926).” Thus, as is apparent from this teaching, the magnetic, anti-mitotic drugs disclosed in this specification may be used not only to treat cancer but also as “ . . . estrogenic drugs, anti-fungal agents . . . , antihelminthics . . . and herbicides . . . . ”

[0173] As is also disclosed in U.S. Pat. No. 5,888,818, “The dinitroaniline herbicides may be considered as an example of one group of anti-tubulin agents. Dinitroaniline herbicides are widely used to control weeds in arable crops, primarily for grass control in dicotyledonous crops such as cotton and soya. Such herbicides include trifluralin, oryzalin, pendimethalin, ethalfluralin and others. The herbicidally active members of the dinitroaniline family exhibit a common mode of action on susceptible plants. For example, dinitroaniline herbicides disrupt the mitotic spindle in the meristems of susceptible plants, and thereby prevent shoot and root elongation (Vaughn K C and Lehnen L P, 1991, Weed Sci, 39:450-457). The molecular target for dinitroaniline herbicides is believed to be tubulin proteins which are the principle constituents of microtubules (Strachan and Hess, 1983, Pestic Biochem Physiology, 20,141-150; Morejohn et al, 1987, Planta, 172, 252-264).”

[0174] As is also disclosed in U.S. Pat. No. 5,888,818, “The extensive interest in anti-tubulin agents in many branches of science has been accompanied by the identification of several mutants shown to resist the action of such agents (Oakley BR, 1985, Can J Blochem Cell Biol, 63:479-488). Several of these mutants have been shown to contain modified .alpha.- or β-tubulin genes, but to date the only resistant mutants to be fully characterised and sequenced are those in β-tubulin. For example, colchicine resistance in mammalian cell lines is closely associated with modified β-tubulin polypeptides (Cabral et al, 1980, Cell, 20, 29-36); resistance to benzimidazole fungicides has been attributed to a modified β-tubulin gene, for example in yeast (Thomas et al, 1985, Genetics, 112, 715-734) and Aspergillus (Jung et al, 1992, Cell Motility and the Cytoskeleton, 22:170-174); some benzimidazole resistant forms of nematode are known; and dinitroaniline-resistant Chlamydomonas mutants possess a modified β-tubulin gene (Lee and Huang, 1990, Plant Cell, 2, 1051-1057). Some of these mutants, although resistant to one anti-tubulin agent, also show increased susceptibility to other anti-tubulin agents (such as cold stress).” As is also discussed elsewhere in this, and in one preferred embodiment, the anti-mitotic compounds and/or compositions of this invention are adapted to bind one or more of the tubulin isotypes expressed by such mutants.

[0175] As is also disclosed in U.S. Pat. No. 5,888,818, “Among certain weed species, some biotypes have evolved resistance to dinitroaniline herbicides. Three examples of species in which dinitroaniline resistant (R) biotypes have emerged are goosegrass, Eleusine indica (Mudge et al, 1984, Weed Sci, 32, 591-594); green foxtail, Setaria viridis (Morrison et al, 1989, Weed Technol, 3, 554-551); and Amaranthus palmeri (Gossett et al, 1992, Weed Technology, 6:587-591). These resistant (R) biotypes emerged following selective pressure exerted by repeated application of trifluralin. A range of resistant biotypes of each species exists but the nature and source of the resistance trait is unclear and the biotypes are genetically undefined. The R biotypes of these species exhibit cross-resistance to a wide range of dinitroaniline herbicides, including oryzalin, pendimethalin and ethalfluralin. All dinitroaniline herbicides have a similar mode of action and are therefore believed to share a common target site. Many of the R biotypes are also cross-resistant to other herbicide groups such as the phosphorothioamidates, which include amiprophos-methyl and butamifos, or chlorthal-dimethyl. The phenomenon of cross-resistance exhibited by resistant biotypes strongly indicates that the herbicide resistance trait is a consequence of a modified target site. In addition, the resistant biotypes appear to have no competitive disadvantage as they grow vigorously and can withstand various stresses (such as cold).” To the extent that the drug resistant trait is “ . . . a consequence of a modified target site . . . ,” and in one preferred embodiment, the magnetic anti-mitotoic compounds of this invention are adapted to preferentially bind to such modified target site.

[0176] As is also disclosed in U.S. Pat. No. 5,888,818, “It has not been previously shown which specific gene is modified in Eleusine indica or Setaria viridis to confer the dinitroaniline resistance trait. Research by K. C. Vaughn and M. A. Vaughn (American Chemical Society Symposium Series, 1989, 364-375) showed an apparent alteration in the electrophoretic properties of β-tubulin present in an R biotype of Eleusine indica, and suggested dinitroaniline resistance results from the presence of a modified β-tubulin polypeptide. The results of recent work by Waldin, Ellis and Hussey (1992, Planta, 188:258-264) provide no evidence that dinitroaniline herbicide resistance is associated with an electrophoretically modified β-tubulin polypeptide in the resistant biotypes of Eleusine indicaor Setaria viridis which were studied.” In one preferred embodiment of this invention, the magnetic anti-mitotic agent of this invention is adapted to bind to a target site on a beta-tubulin polypeptide.

[0177] U.S. Pat. No. 6,306,615, the entire disclosure of which is hereby incorporated by reference into this specification, claims a detection method for identifying modified beta-tubulin isotypes. Thus, e.g., claim 17 of this patent discloses: “17. A method of monitoring the amount of a tubulin modified at a cysteine residue at amino acid position 239 in a patient treated with a sulfhydryl or a disulfide tubulin modifying agent, the method comprising the steps of: (a) providing a sample from the patient treated with the tubulin modifying agent; (b) contacting the sample with an antibody that specifically binds to the tubulin modified at a cysteine residue at amino acid position 239; and (c) determining the amount of the tubulin modified at a cysteine residue at amino acid position 239 in the patient sample by detecting the antibody and comparing the amount of antibody detected in the patient sample to a standard curve, thereby monitoring the amount of the tubulin modified at a cysteine residue at amino acid position 239 in the patient.”

[0178] As is also disclosed in U.S. Pat. No. 6,306,615, “Microtubules are composed of .alpha./β-tubulin heterodimers and constitute a crucial component of the cell cytoskeleton. Furthermore, microtubules play a pivotal role during cell division, in particular when the replicated chromosomes are separated during mitosis. Interference with the ability to form microtubules from .alpha./β-tubulin heterodimeric subunits generally leads to cell cycle arrest. This event can, in certain cases, induce programmed cell death. Thus, natural products and organic compounds that interfere with microtubule formation have been used successfully as chemotherapeutic agents in the treatment of various human cancers.”

[0179] As is also disclosed in U.S. Pat. No. 6,306,615, “Pentafluorophenylsulfonamidobenzenes and related sulfhydryl and disulfide modifying agents (see, e.g., compound 1; 2-fluoro-1-methoxy-4-pentafluorophenylsulfonamidobenzene; . . . prevent microtubule formation by selectively covalently modifying β-tubulin. For example, compound 1 does not covalently modify all of the five known β-tubulin isotypes. Instead, binding is restricted to those β-tubulin isotypes that have a cysteine residue at amino acid position 239 in β-tubulin. Such isotypes include beta-1, beta-2, and beta-4. The other two isotypes (beta-3 and beta-5) have a serine residue at this particular position (Shan et al., Proc. Nat'l Acad. Sci USA 96:5686-5691 (1999)). It is notable that no other cellular proteins are modified by compound 1.” In one embodiment of this invention, the anti-mitotic compound of this invention selectively covalently modifies certain beta-tubulin isotypes but does not covalently modify other proteins.

[0180] U.S. Pat. No. 6,362,321. the entire disclosure of which is hereby incorporated by reference into this specification, discusses taxol-resistant cancer cell lines. At column 1 of this patent, it is disclosed that: “Many of the most common carcinomas, including breast and ovarian cancer, are initially relatively sensitive to a wide variety chemotherapy agents. However, acquired drug resistance phenotype typically occurs after months or years of exposure to chemotherapy. Determining the molecular basis of drug resistance may offer opportunities for improved diagnostic and therapeutic strategies.”

[0181] As is also disclosed in U.S. Pat. No. 6,362,32,“Taxol is a natural product derived from the bark of Taxus brevafolio (Pacific yew). Taxol inhibits microtubule depolymerization during mitosis and results in subsequent cell death. Taxol displays a broad spectrum of tumorcidal activity including against breast, ovary and lung cancer (McGuire et al., 1996, N. Engld. J. Med. 334:1-6; and Johnson et al., 1996, J. Clin. Ocol. 14:2054-2060). While taxol is often effective in treatment of these malignancies, it is usually not curative because of eventual development of taxol resistance. Cellular resistance to taxol may include mechanisms such as enhanced expression of P-glycoprotein and alterations in tubulin structure through gene mutations in the β chain or changes in the ratio of tubulin isomers within the polymerized microtubule (Wahl et al., 1996, Nature Medicine 2:72-79; Horwitz et al., 1993, Natl. Cancer Inst. 15:55-61; Haber et al., 1995, J. Biol. Chem. 270:31269-31275; and Giannakakou et al., 1997, J. Biol. Chem. 272:17118-17125). Some tumors acquires taxol resistance through unknown mechanisms.”

[0182] International publication WO02/36603A2, the entire disclosure of which is hereby incorporated by reference into this specification, discloses nucleic acid molecules comprising a nucleotide sequence encoding a tubulin molecule. At pages 1 et seq. of this patent document, it is disclosed that: “Microtubules are essential to the eucaryotic cell due as they are involved in many processes and functions such as, e.g., being components of the cytoskeleton, of the centrioles and ciliums and in the formation of spindle fibres during mitosis. The constituents of microtubules are heterodimers consisting of one alpha-tubulin molecule and one beta-tubulin molecule. These two related self-associating 50 kDa proteins are encoded by a multigen family. The various members of this multigen family are dispersed all over the human genorne. Both alpha-tubulin and beta-tubulin are most likely to originate from a common ancestor as their amino acid sequence shows a homology of up to 50%. In man there are at least 15 genes or pseudogenes for tubulin.

[0183] As is also disclosed in International Publication WO0236603, “The conservation of structure and regulatory functions among the beta-tubulin genes in three vertebrate species (chicken, mouse and human) allowed the identification of and categorization into six major classes of beta-tubulin polypeptide isotypes on the basis of their variable carboxyterminal ends. The specific, highly variable 15 carboxyterminal amino acids are very conserved among the various species. Beta-tubulins of categories I, 11, and IV are closely related differing only 2-4% in contrast to categories III, V and VI which differ in 8-16% of amino acid positions [Sullivan K. F., 1988, Ann. Rev. Cell Biol. 4: 687-716].

[0184] As is also disclosed in International Publication WO0236603, “Also the expression pattern is very similar between the various species as can be taken from the following table [Sullivan K. F., 1988, Arm. Rev. Cell Biol. 4: 687-716] which comprises the respective human members of each class . . . . The C terminal end of the beta-tubulins starting from amino acid 430 is regarded as highly variable between the various classes. Additionally, the members of the same class seem to be very conserved between the various species.”

[0185] As is also disclosed in International Publication WO0236603, “As tubulin molecules are involved in many processes and form part of many structures in the eucaryotic cell, they are possible targets for pharmaceutically active compounds. As tubulin is more particularly the main structural component of the microtubules it may act as point of attack for anticancer drugs such as vinblastin, colchicin, estramustin and taxol which interfere with microtubule function. The mode of action is such that cytostatic agents such as the ones mentioned above, bind to the carboxyterminal end the beta-tubulin which upon such binding undergoes a conformational change. For example, Kavallaris et al. [Kavallaris et al. 1997, J. Clin. Invest. 100: 1282-1293] reported a change in the expression of of specific beta-tubulin isotypes (class I, II, III, and IVa) in taxol resistant epithelial ovarian tumor. It was concluded that these tubulins are involved in the formation of the taxol resistence. Also a high expression of class III beta—tubulins was found in some forms of lung cancer suggesting that this isotype may be used as a diagnostic marker.”

[0186] As is also disclosed in International Publication WO0236603, “The problem underlying the present invention was to provide the means to further characterize the various tubulins present in eucaryotic cells. A further problem underlying the present invention was to provide the means to extend possible screening programs for cytostatic agents to other isótypes of human beta-tubulins. This problem is solved in a first aspect by a nucleic acid molecule comprising a nucleotide sequence encoding a tubulin molecule, wherein said nucleic acid molecule comprises the sequence according to SEQ. ID. No. 1 This problem is solved in a second aspect by a nucleic acid molecule comprising a nucleotide sequence encoding a tubulin molecule, wherein said nucleic acid molecule comprises the sequence according to SEQ. ID. No. 2.” The aforementioned SEQ. ID. No. 1 and SEQ. ID. No. 2 are referred to herein as SEQ. ID No. 291 and 292 respectively.

[0187] Published United States patent application 2002/0106705, the entire disclosure of which is hereby incorporated by reference into this specification, describes a method for detecting a modified beta-tubulin isotype. Claim 1 of this patent, which is typical, describes: “A method of detecting in a sample a β-tubulin isotype modified at cysteine residue 239, the method comprising the steps of: (a) providing a sample treated with a β-tubulin modifying agent; (b) contacting the sample with an antibody that specifically binds to a β-tubulin isotype modified at cysteine residue 239; and (c) determining whether the sample contains a modified β-tubulin isotype by detecting the antibody.” This patent discloses that: “Microtubules are composed of α/β-tubulin heterodimers and constitute a crucial component of the cell cytoskeleton. Furthermore, microtubules play a pivotal role during cell division, in particular when the replicated chromosomes are separated during mitosis. Interference with the ability to form microtubules from α/β-tubulin heterodimeric subunits generally leads to cell cycle arrest. This event can, in certain cases, induce programmed cell death. Thus, natural products and organic compounds that interfere with microtubule formation have been used successfully as chemotherapeutic agents in the treatment of various human cancers.”

[0188] Published United States paent application 2002/0106705 also discloses that: “Pentafluorophenylsulfonamidobenzenes and related sulfhydryl and disulfide modifying agents (see, e.g., compound 1; 2-fluoro-1-methoxy-4-pentafluorophenylsulfonamidobenzene . . . prevent microtubule formation by selectively covalently modifying β-tubulin. For example, compound 1 does not covalently modify all of the five known β-tubulin isotypes. Instead, binding is restricted to those β-tubulin isotypes that have a cysteine residue at amino acid position 239 in β-tubulin. Such isotypes include β1, β2 and β4-tubulin. The other two isotypes (β3 and β5) have a serine residue at this particular position (Shan et al., Proc. Nat'l Acad. Sci USA 96:5686-5691 (1999)). It is notable that no other cellular proteins are modified by compound 1.”

[0189] Published United States paent application 2002/0106705 relates primarily to a “ . . . a β-tubulin isotype modified at cysteine residue 239 . . . ” Thus, at page 3 of this published patent application, in defining a “beta-tubulin modifying agent,” it describes such agent as follows: “A “β-tubulin modifying agent” refers to an agent that has the ability to specifically react with an amino acid residue of β-tubulin, preferably a cysteine, more preferably the cysteine residue at position 239 of a β-tubulin isotype such as β1- β2- or β4-tubulin and antigenic fragments thereof comprising the residue, preferably cysteine 239. The β-tubulin modifying agent of the invention can be, e.g., any sulfhydryl or disulfide modifying agent known to those of skill in the art that has the ability to react with the sulfur group on a cysteine residue, preferably cysteine residue 239 of a β-tubulin isotype. Preferably, the β-tubulin modifying agents are substituted benzene compounds, pentafluorobenzenesulfonamides, arylsulfonanilide phosphates, and derivatives, analogs, and substituted compounds thereof (see, e.g., U.S. Pat. No. 5,880,151; PCT 97/02926; PCT 97/12720; PCT 98/16781; PCT 99/13759; and PCT 99/16032, herein incorporated by reference; see also Pierce Catalogue, 1999/2000, and Means, Chemical Modification of Proteins). In one embodiment, the agent is 2-fluoro-1-methoxy-4-pentafluorophenylsulfonamidobenzene (compound 1; FIG. 1C). Modification of a β-tubulin isotype at an amino acid residue, e.g., cysteine 239, by an agent can be tested by treating a β-tubulin peptide, described herein, with the putative agent, followed by, e.g., elemental analysis for a halogen, e.g., fluorine, reverse phase HPLC, NMR, or sequencing and HPLC mass spectrometry. Optionally compound 1 described herein can be used as a positive control. Similarly, an α-tubulin modifying agent refers to an agent having the ability to specifically modify an amino acid residue of an α-tubulin.”

[0190] U.S. Pat. No. 6,541,509, the entire disclosure of which is hereby incorporated by reference into this specification, discloses a “method for treating neoplasis using combination chemotherapy.” Claim 1 of this patent describes: “A method of treating neoplasia in a subject in need of treatment, comprising administering to the subject an amount of paclitaxel effective to treat the neoplasia, in combination with an amount of discodermolide effective to treat the neoplasia, wherein a synergistic antineoplastic effect results.” At column 6 of this patent, the patentees discuss how to determine synergy between two drugs. They state that: One measure of synergy between two drugs is the combination index (CI) method of Chou and Talalay [37], which is based on the median-effect principle. This method calculates the degree of synergy, additivity, or antagonism between two drugs at various levels of cytotoxicity. Where the CI value is less than 1, there is synergy between the two drugs. Where the CI value is 1, there is an additive effect, but no synergistic effect. CI values greater than 1 indicate antagonism. The smaller the CI value, the greater the synergistic effect. Another measurement of synergy is the fractional inhibitory concentration (FIC) [48]. This fractional value is determined by expressing the IC50 of a drug acting in combination, as a function of the IC50 of the drug acting alone. For two interacting drugs, the sum of the FIC value for each drug represents the measure of synergistic interaction. Where the FIC is less than 1, there is synergy between the two drugs. An FIC value of 1 indicates an additive effect. The smaller the FIC value, the greater the synergistic interaction. In the method of the present invention, combination therapy using paclitaxel and discodermolide preferably results in an antineoplastic effect that is greater than additive, as determined by any of the measures of synergy known in the art.” The cited Chou et al. reference is an entited “Quantitative analysis of dose effect relationships: the combined effect of multiple drugs or enzyme inhibitors,” Adv. Enzyme Regul., 11:27-56 (1984). The cited “reference 48 is an article by Hall et al., “The fractional inhibitory concentration (FIC) as a measure of synergy,” J. Antimicrob. Chemother., 11(5):427-433 (1983).

[0191] Claim 8 of U.S. Pat. No. 6,541,509 describes “A synergistic combination of antineoplastic agents, comprising an effective antimenoplastic amount of paclitaxel and an effective antineoplastic amount of discodermolide.” As one embodiment of the instant invention, applicants claims: A synergistic combination of antineoplastic agents, comprising an effective antimenoplastic amount of paclitaxel and an effective antineoplastic amount of the preferred, magnetic anti-mitotic compound of this inventon. Thus, the process of such U.S. Pat. No. 6,541,509 may be adapted to use the magnetic compound of this invention instead of discodermolide.

[0192] As is disclosed in U.S. Pat. No. 6,541,509, “The present invention provides a method of treating neoplasia in a subject in need of treatment. As used herein, ‘neoplasia’ refers to the uncontrolled and progressive multiplication of cells under conditions that would not elicit, or would cause cessation of, multiplication of normal cells. Neoplasia results in the formation of a ‘neoplasm’, which is defined herein to mean any new and abnormal growth, particularly a new growth of tissue, in which the growth is uncontrolled and progressive. Malignant neoplasms are distinguished from benign in that the former show a greater degree of anaplasia, or loss of differentiation and orientation of cells, and have the properties of invasion and metastasis. Thus, neoplasia includes ‘cancer’, which herein refers to a proliferation of cells having the unique trait of loss of normal controls, resulting in unregulated growth, lack of differentiation, local tissue invasion, and metastasis.” As support for this statement, the patent cited a work by Beers and Berkow (eds.), The Merck Manual of Diagnosis and Therapy, 17^{th} edition (Whitehouse Station, N.J.; Merck Research Laboratories, 1999, 973-974, 976, 986, and 991).

[0193] As is also disclosed in U.S. Pat. No. 6,541,509, “ . . . neoplasia is treated in a subject in need of treatment by administering to the subject an amount of paclitaxel effective to treat the neoplasia, in combination with an amount of discodermolide effective to treat the neoplasia, wherein a synergistic antineoplastic effect results. The subject is preferably a mammal (e.g., humans, domestic animals, and commercial animals, including cows, dogs, monkeys, mice, pigs, and rats), and is most preferably a human.” In the embodiment described in this specification, the magnetic compound of this invention replaces discomdermolide.

[0194] As is also disclosed in U.S. Pat. No. 6,541,509, “ . . . ‘paclitaxel’ refers to paclitaxel and analogues and derivatives thereof, including, for example, a natural or synthetic functional variant of paclitaxel which has paclitaxel biological activity, as well as a fragment of paclitaxel having paclitaxel biological activity. As further used herein, the term “paclitaxel biological activity” refers to paclitaxel activity which interferes with cellular mitosis by affecting microtubule formation and/or action, thereby producing antimitotic and antineoplastic effects. Furthermore, as used herein, ‘antineoplastic’ refers to the ability to inhibit or prevent the development or spread of a neoplasm, and to limit, suspend, terminate, or otherwise control the maturation and proliferation of cells in a neoplasm.”

[0195] As is also disclosed in U.S. Pat. No. 6,541,509, “Methods of preparing paclitaxel and its analogues and derivatives are well-known in the art, and are described, for example, in U.S. Pat. Nos. 5,569,729; 5,565,478; 5,530,020; 5,527,924; 5,484,809; 5,475,120; 5,440,057; and 5,296,506. Paclitaxel and its analogues and derivatives are also available commercially. Synthetic paclitaxel, for example, can be obtained from Bristol-Myers Squibb Company, Oncology Division (Princeton, N.J.), under the registered trademark Taxol. Taxol for injection may be obtained in a single-dose vial, having a concentration of 30 mg/5 mL (6 mg/mL per 5 mL) [47]. Taxol and its analogues and derivatives have been used successfully to treat leukemias and tumors. In particular, Taxol is useful in the treatment of breast, lung, and ovarian cancers. Discodermolide and its analogues and derivatives can be isolated from extracts of the marine sponge, Discodermia dissoluta, as described, for example, in U.S. Pat. Nos. 5,010,099 and 4,939,168. Discodermolide and its analogues and derivatives also may be synthesized, as described, for example, in U.S. Pat. No. 6,096,904. Moreover, both paclitaxel and discodermolide may be synthesized in accordance with known organic chemistry procedures [46] that are readily understood by one skilled in the art.”

[0196] As is also disclosed in U.S. Pat. No. 6,541,509, “In the method of the present invention, an amount of paclitaxel or discodermolide that is ‘effective to treat the neoplasia’ is an amount that is effective to ameliorate or minimize the clinical impairment or symptoms of the neoplasia, in either a single or multiple dose. For example, the clinical impairment or symptoms of the neoplasia may be ameliorated or minimized by diminishing any pain or discomfort suffered by the subject; by extending the survival of the subject beyond that which would otherwise be expected in the absence of such treatment; by inhibiting or preventing the development or spread of the neoplasm; or by limiting, suspending, terminating, or otherwise controlling the maturation and proliferation of cells in the neoplasm. For example, doses of paclitaxel (Taxol) administered intraperitoneally may be between 1 and 10 mg/kg, and doses administered intravenously may be between 1 and 3 mg/kg, or between 135 mg/m2 and 200 mg/m2. However, the amounts of paclitaxel and discodermolide effective to treat neoplasia in a subject in need of treatment will vary depending on the particular factors of each case, including the type of neoplasm, the stage of neoplasia, the subject's weight, the severity of the subject's condition, and the method of administration. These amounts can be readily determined by the skilled artisan.”

[0197] As is also disclosed in U.S. Pat. No. 6,541,509, “The method of the present invention may be used to treat neoplasia in a subject in need of treatment. Neoplasias for which the present invention will be particularly useful include, without limitation, carcinomas, particularly those of the bladder, breast, cervix, colon, head, kidney, lung, neck, ovary, prostate, and stomach; lymphocytic leukemias, particularly acute lymphoblastic leukemia and chronic lymphocytic leukemia; myeloid leukemias, particularly acute monocytic leukemia, acute promyelocytic leukemia, and chronic myelocytic leukemia; malignant lymphomas, particularly Burkitt's lymphoma and Non-Hodgkin's lymphoma; malignant melanomas; myeloproliferative diseases; sarcomas, particularly Ewing's sarcoma, hemangiosarcoma, Kaposi's sarcoma, liposarcoma, peripheral neuroepithelioma, and synovial sarcoma; and mixed types of neoplasias, particularly carcinosarcoma and Hodgkin's disease [45]. Preferably, the method of the present invention is used to treat breast cancer, colon cancer, leukemia, lung cancer, malignant melanoma, ovarian cancer, or prostate cancer.” The aforementioned neoplasias may also be treated by the process of the instant invention.

[0198] As is also disclosed in U.S. Pat. No. 6,541,509, “In the method of the present invention, paclitaxel is administered to a subject in combination with discodermolide, such that a synergistic antineoplastic effect is produced. A ‘synergistic antineoplastic effect’ refers to a greater-than-additive antineoplastic effect which is produced by a combination of two drugs, and which exceeds that which would otherwise result from individual administration of either drug alone. Administration of paclitaxel in combination with discodermolide unexpectedly results in a synergistic antineoplastic effect by providing greater efficacy than would result from use of either of the antineoplastic agents alone. Discodermolide enhances paclitaxel's effects. Therefore, lower doses of one or both of the antineoplastic agents may be used in treating neoplasias, resulting in increased therapeutic efficacy and decreased side-effects.” As will be apparent, in applicants' invention the discodermolide is replaced by the magnetic anti-mitotic compound described in this specification.

[0199] As is also disclosed in U.S. Pat. No. 6,541,509, “Discodermolide also may provide a means to circumvent clinical resistance due to overproduction of P-glycoprotein. Accordingly, the combination of paclitaxel and discodermolide may be advantageous for use in subjects who exhibit resistance to paclitaxel (Taxol). Since Taxol is frequently utilized in the treatment of human cancers, a strategy to enhance its utility in the clinical setting, by combining its administration with that of discodermolide, may be of great benefit to many subjects suffering from malignant neoplasias, particularly advanced cancers.” The comments made regading discodermolide are equally applicable to applicants' magnetic anti-mitotic agent.

[0200] As is also disclosed in U.S. Pat. No. 6,541,509, “In the method of the present invention, administration of paclitaxel ‘in combination with’ discodermolide refers to co-administration of the two antineoplastic agents. Co-administration may occur concurrently, sequentially, or alternately. Concurrent co-administration refers to administration of both paclitaxel and discodermolide at essentially the same time. For concurrent co-administration, the courses of treatment with paclitaxel and with discodermolide may be run simultaneously. For example, a single, combined formulation, containing both an amount of paclitaxel and an amount of discodermolide in physical association with one another, may be administered to the subject. The single, combined formulation may consist of an oral formulation, containing amounts of both paclitaxel and discodermolide, which may be orally administered to the subject, or a liquid mixture, containing amounts of both paclitaxel and discodermolide, which may be injected into the subject.” The same means of administration may be used in the process of the instant inventin.

[0201] As is also disclosed in U.S. Pat. No. 6,541,509, “It is also within the confines of the present invention that an amount of paclitaxel and an amount of discodermolide may be administered concurrently to a subject, in separate, individual formulations. Accordingly, the method of the present invention is not limited to concurrent co-administration of paclitaxel and discodermolide in physical association with one another.” The same means of administration may be used in the process of the instant invention.

[0202] As is also disclosed in U.S. Pat. No. 6,541,509, “In the method of the present invention, paclitaxel and discodermolide also may be co-administered to a subject in separate, individual formulations that are spaced out over a period of time, so as to obtain the maximum efficacy of the combination. Administration of each drug may range in duration from a brief, rapid administration to a continuous perfusion. When spaced out over a period of time, co-administration of paclitaxel and discodermolide may be sequential or alternate. For sequential co-administration, one of the antineoplastic agents is separately administered, followed by the other. For example, a full course of treatment with paclitaxel may be completed, and then may be followed by a full course of treatment with discodermolide. Alternatively, for sequential co-administration, a full course of treatment with discodermolide may be completed, then followed by a full course of treatment with paclitaxel. For alternate co-administration, partial courses of treatment with paclitaxel may be alternated with partial courses of treatment with discodermolide, until a full treatment of each drug has been administered.” The same means of administration may be used in the process of the instant invention.

[0203] As is also disclosed in U.S. Pat. No. 6,541,509, “The antineoplastic agents of the present invention (i.e., paclitaxel and discodermolide, either in separate, individual formulations, or in a single, combined formulation) may be administered to a human or animal subject by known procedures, including, but not limited to, oral administration, parenteral administration (e.g., intramuscular, intraperitoneal, intravascular, intravenous, or subcutaneous administration), and transdermal administration. Preferably, the antineoplastic agents of the present invention are administered orally or intravenously.” The same means of administration may be used in the process of the instant invention.

[0204] As is also disclosed in U.S. Pat. No. 6,541,509, “For oral administration, the formulations of paclitaxel and discodermolide (whether individual or combined) may be presented as capsules, tablets, powders, granules, or as a suspension. The formulations may have conventional additives, such as lactose, mannitol, corn starch, or potato starch. The formulations also may be presented with binders, such as crystalline cellulose, cellulose derivatives, acacia, corn starch, or gelatins. Additionally, the formulations may be presented with disintegrators, such as corn starch, potato starch, or sodium carboxymethyl-cellulose. The formulations also may be presented with dibasic calcium phosphate anhydrous or sodium starch glycolate. Finally, the formulations may be presented with lubricants, such as talc or magnesium stearate.” The same means of administration may be used in the process of the instant invention.

[0205] As is also disclosed in U.S. Pat. No. 6,541,509, “For parenteral administration, the formulations of paclitaxel and discodermolide (whether individual or combined) may be combined with a sterile aqueous solution which is preferably isotonic with the blood of the subject. Such formulations may be prepared by dissolving a solid active ingredient in water containing physiologically-compatible substances, such as sodium chloride, glycine, and the like, and having a buffered pH compatible with physiological conditions, so as to produce an aqueous solution, then rendering said solution sterile. The formulations may be presented in unit or multi-dose containers, such as sealed ampules or vials. Moreover, the formulations may be delivered by any mode of injection, including, without limitation, epifascial, intracapsular, intracutaneous, intramuscular, intraorbital, intraperitoneal (particularly in the case of localized regional therapies), intraspinal, intrasternal, intravascular, intravenous, parenchymatous, or subcutaneous.” The same means of administration may be used in the process of the instant invention.

[0206] As is also disclosed in U.S. Pat. No. 6,541,509, “For transdermal administration, the formulations of paclitaxel and discodermolide (whether individual or combined) may be combined with skin penetration enhancers, such as propylene glycol, polyethylene glycol, isopropanol, ethanol, oleic acid, N-methylpyrrolidone, and the like, which increase the permeability of the skin to the antineoplastic agent, and permit the antineoplastic agent to penetrate through the skin and into the bloodstream. The antineoplastic agent/enhancer compositions also may be further combined with a polymeric substance, such as ethylcellulose, hydroxypropyl cellulose, ethylene/vinylacetate, polyvinyl pyrrolidone, and the like, to provide the composition in gel form, which may be dissolved in a solvent such as methylene chloride, evaporated to the desired viscosity, and then applied to backing material to provide a patch.” The same means of administration may be used in the process of the instant invention.

[0207] As is also disclosed in U.S. Pat. No. 6,541,509, “It is within the confines of the present invention that the formulations of paclitaxel and discodermolide (whether individual or combined) may be further associated with a pharmaceutically-acceptable carrier, thereby comprising a pharmaceutical composition. The pharmaceutically-acceptable carrier must be “acceptable” in the sense of being compatible with the other ingredients of the composition, and not deleterious to the recipient thereof. Examples of acceptable pharmaceutical carriers include Cremophor.™. (a common vehicle for Taxol), as well as carboxymethyl cellulose, crystalline cellulose, glycerin, gum arabic, lactose, magnesium stearate, methyl cellulose, powders, saline, sodium alginate, sucrose, starch, talc, and water, among others. Formulations of the pharmaceutical composition may conveniently be presented in unit dosage.” The same means of administration may be used in the process of the instant invention.

[0208] As is also disclosed in U.S. Pat. No. 6,541,509, “The formulations of the present invention may be prepared by methods well-known in the pharmaceutical art. For example, the active compound may be brought into association with a carrier or diluent, as a suspension or solution. Optionally, one or more accessory ingredients (e.g., buffers, flavoring agents, surface active agents, and the like) also may be added. The choice of carrier will depend upon the route of administration. The pharmaceutical composition would be useful for administering the antineoplastic agents of the present invention (i.e., paclitaxel and discodermolide, and their analogues and derivatives, either in separate, individual formulations, or in a single, combined formulation) to a subject to treat neoplasia. The antineoplastic agents are provided in amounts that are effective to treat neoplasia in the subject. These amounts may be readily determined by the skilled artisan.” Similar formulations may be used in the process of the instant invention.

[0209] As is also disclosed in U.S. Pat. No. 6,541,509, “It is also within the confines of the present invention that paclitaxel and discodermolide be co-administered in combination with radiation therapy or an antiangiogenic compound (either natural or synthetic). Examples of antiangiogenic compounds with which paclitaxel and discodermolide may be combined include, without limitation, angiostatin, tamoxifen, thalidomide, and thrombospondin.” Similar compositons may be used in the process of the instant invention.

[0210] As is also disclosed in U.S. Pat. No. 6,541,509, “The present invention further provides a synergistic combination of antineoplastic agents. As defined above, ‘antineoplastic’ refers to the ability to inhibit or prevent the development or spread of a neoplasm, and to limit, suspend, terminate, or otherwise control the maturation and proliferation of cells in a neoplasm. As used herein, a “synergistic combination of antineoplastic agents” refers to a combination of antineoplastic agents that achieves a greater antineoplastic effect than would otherwise result if the antineoplastic agents were administered individually. Additionally, as described above, the “antineoplastic agents” of the present invention are paclitaxel and discodermolide, and their analogues and derivatives, either in separate, individual formulations, or in a single, combined formulation. Administration of paclitaxel in combination with discodermolide unexpectedly results in a synergistic antineoplastic effect by providing greater efficacy than would result from use of either of the antineoplastic agents alone.” Similar synergistic combinations may be used in the process of the instant invention.

[0211] As is also disclosed in U.S. Pat. No. 6,541,509, “In the synergistic combination of the present invention, paclitaxel and discodermolide may be combined in a single formulation, such that the amount of paclitaxel is in physical association with the amount of discodermolide. This single, combined formulation may consist of an oral formulation, containing amounts of both paclitaxel and discodermolide, which may be orally administered to the subject, or a liquid mixture, containing amounts of both paclitaxel and discodermolide, which may be injected into the subject.” Similar synergistic combinations may be used in the process of the instant invention.

[0212] As is also disclosed in U.S. Pat. No. 6,541,509, “Alternatively, in the synergistic combination of the present invention, a separate, individual formulation of paclitaxel may be combined with a separate, individual formulation of discodermolide. For example, an amount of paclitaxel may be packaged in a vial or unit dose, and an amount of discodermolide may be packaged in a separate vial or unit dose. A synergistic combination of paclitaxel and discodermolide then may be produced by mixing the contents of the separate vials or unit doses in vitro. Additionally, a synergistic combination of paclitaxel and discodermolide may be produced in vivo by co-administering to a subject the contents of the separate vials or unit doses, according to the methods described above. Accordingly, the synergistic combination of the present invention is not limited to a combination in which amounts of paclitaxel and discodermolide are in physical association with one another in a single formulation.” Similar synergistic combinations may be used in the process of the instant invention.

[0213] As is also disclosed in U.S. Pat. No. 6,541,509, “The synergistic combination of the present invention comprises an effective antineoplastic amount of paclitaxel and an effective antineoplastic amount of discodermolide. As used herein, an ‘effective antineoplastic amount’ of paclitaxel or discodermolide is an amount of paclitaxel or discodermolide that is effective to ameliorate or minimize the clinical impairment or symptoms of neoplasia in a subject, in either a single or multiple dose. For example, the clinical impairment or symptoms of neoplasia may be ameliorated or minimized by diminishing any pain or discomfort suffered by the subject; by extending the survival of the subject beyond that which would otherwise be expected in the absence of such treatment; by inhibiting or preventing the development or spread of the neoplasm; or by limiting, suspending, terminating, or otherwise controlling the maturation and proliferation of cells in the neoplasm.” These comments are equally applicable to the process of the instant invention, in which discodermolide is replaced by the magnetic anti-mitotic compound of this invention.

[0214] As is also discussed in U.S. Pat. No. 6,541,509, “The effective antineoplastic amounts of paclitaxel and discodermolide will vary depending on the particular factors of each case, including the type of neoplasm, the stage of neoplasia, the subject's weight, the severity of the subject's condition, and the method of administration. For example, effective antineoplastic amounts of paclitaxel (Taxol) administered intraperitoneally may range from 1 to 10 mg/kg, and doses administered intravenously may range from 1 to 3 mg/kg, or from 135 mg/m2 to 200 mg/m2. Nevertheless, the appropriate effective antineoplastic amounts of paclitaxel and discodermolide can be readily determined by the skilled artisan.” These comments are equally applicable to the process of the instant invention, in which discodermolide is replaced by the magnetic anti-mitotic compound of this invention

[0215] As is also disclosed in U.S. Pat. No. 6,541,509, “The synergistic combination described herein may be useful for treating neoplasia in a subject in need of treatment. Paclitaxel and discodermolide, which comprise the synergistic combination of the present invention, may be co-administered to a subject concurrently, sequentially, or alternately, as described above. Moreover, the paclitaxel and discodermolide of the present invention may be administered to a subject by any of the methods, and in any of the formulations, described above.” These comments are equally applicable to the process of the instant invention, in which discodermolide is replaced by the magnetic anti-mitotic compound of this invention

[0216] By way of yet further illustration, and referring to published United States patent application 2003/0235855 (the entire disclosure of which is hereby incorporated by reference into this specification), claims an assay for the detection of paclitaxel resistant cells in human tumors. Claim 4 of this published patent application, which is typical, claims: “An isolated tubulin amino acid sequence comprising an amino acid sequence having at least one mutation, the mutation selected from the group consisting of a mutation at position 210, a mutation at position 214, a mutation at position 215, a mutation at position 216, a mutation at position 217, a mutation at position 225, a mutation at position 228, a mutation at position 270, a mutation at position 273, a mutation at position 292, and a mutation at position 365 and any combination thereof.”

[0217] At page 1 of published United States patent application 2003/0235855, the importance of paclitaxel is discussed. It is disclosed that “Paclitaxel (Taxol), Taxotere and other paclitaxel-like drugs that are currently under development hold great promise for the treatment of human cancer. Paclitaxel has shown remarkable activity against breast and ovarian cancer, melanomas, non-small lung carcinoma, esophogeal cancer, Kaposi's sarcoma, and some hematological malignancies. It has been described as the most significant antitumor drug developed in the last several decades and will, without doubt, find widespread use in the treatment of cancer. However, as is true of virtually all cancer chemotherapeutic drugs, patients responsive to paclitaxel eventually relapse due to the emergence of drug resistant tumor cells. Thus, there is a need in the art for methods to identify paclitaxel-resistant tumor cells, for agents that allow such identifications in a simple and cost effective way, and for methods for to treat patients with paclitaxel resistant tumor cells.” The solution presented to this problem in such published patent application is also described at page 1 thereof, wherein it is stated that: “The present invention involves polynucleotide mutations which confer paclitaxel resistance; mutant cells which are paclitaxel resistant; and methods to determine paclitaxel resistance. The present invention also provides a simple assay with sufficient sensitivity to detect drug resistant cells in tumor biopsies by extracting polynucleotide from the tissue. The extracted polynucleotide is then hybridized to mutant-specific PCR primers and the mutant regions of tubulin are identified by selective amplification. Once identified, a secondary treatment protocol can be administered to the patient to aid in tumor treatment.”

[0218] At pages 2 et seq. of published United States patent application 2003/0235855, the inventor discloses that “ . . . mutations able to conver resistance to paclitaxel are clustered in several small regions of beta-tubulin.” In paragraphs 0022 et seq., it is disclosed that: “The inventor has found that mutations able to confer resistance to paclitaxel are clustered in several small regions of β-tubulin (Tables I-III) including I210T, T214A, L215H, L215R, L215F, L215A, L215E, L215M, L215P, K216A, L217R, L217N, L217A, L225M, L228A, L228F, L228H, F270C, L273V, Q292H, and V365D. Of these 21 identified and sequenced mutant tubulins, 15 or 62% have a substitution at leucine including locations 215, 217, 225, 228 and 273. Of the 15 total leucine mutants, 7 or 46.7% occur at leu215, 3 or 20% occur at leu217, 3 or 20% occur at leu228, 1 or 6.7% occur at leu225 and 1 or 6.7% occur at leu273. The ability of 19 of the 21 total mutations to confer paclitaxel resistance has been confirmed by transfecting mutant cDNAs into wild-type cells.”

[0219] It is also disclosed in published United States patent application 2003/0235855 (commencing at page 3 thereof) that:“The clustering of mutations affecting leucines is unusual and unexpected. Also unexpected is the three relatively localized regions of mutation, 210-217, 225-228, and 270-273, and two isolated sites of mutations, 292 and 365. Although some of these regions appear distant in the primary structure, they are actually close together in the tertiary structure of β-tubulin. The data support the hypothesis that the mutations affect a critical interaction between tubulin subunits necessary for microtubule assembly and that the mechanism of paclitaxel is to facilitate this interaction.” Thereafter, in the middle of page 3 of such patent application, Table 1 is presented.

[0220] It is also disclosed in published United States patent application 2003/0235855 (commencing at page 3 thereof) that: “Table V below contains the corresponding β-tubulin protein sequences for the variants listed in Table I: L215H (Seq. No. 10); L215R (Seq. No. 11); L215F (Seq. No. 12); L217R (Seq. No. 13); L228F (Seq. No. 14); and L228H (Seq. No. 15). All of these mutations result in amino acid substitutions at 3 leucine residues that are within 14 amino acids of one another.” The aforementioned Seq. No. 10, 11, 12, 13,14, and 15 are listed in this application's sequence listing as SEQ. ID. No. 293, 294, 295, 296, 297 and 298 respectively.

[0221] It is also disclosed in published United States patent application 2003/0235855 (commencing at page 3 thereof) that: “Using site-directed mutagenesis, the inventor has identified additional mutations in the H6/H7 loop of beta tubulin (that contains L215 and L217) that confer paclitaxel resistance. Table II lists the cell line, a portion of the encoding region including the mutated codon and the protein alteration.” Thereafer, Table II is presented on page 3 of the patent application.

[0222] It is also disclosed in published United States patent application 2003/0235855 (commencing at page 4 thereof) that: “The corresponding β-tubulin protein sequences (see Table IV) are: T214A (Seq. No. 24), L215A (Seq. No. 25), L215E (Seq. No. 26), L215M (Seq. No. 27), L215P (Seq. No. 28), K216A (Seq. No. 29), L217A (Seq. No. 30) and L228A (Seq. No. 31). The present invention also relates to probes having at least 12 bases including the codon for the particular amino acid substitution.” The aforementioned Seq. No. 24, 25, 26, 27, 28, 29, 30 and 31 are listed in this application's sequence listing as SEQ. ID. No. 299, 300, 301, 302, 303, 304, 305, and 306 respectively.

[0223] It is also disclosed in published United States patent application 2003/0235855 (commencing at page 3 thereof) that: “More recently, the inventor has found that the number of mutations that confer resistance to paclitaxel are likely to be small and that most are clustered in a small region of β-tubulin. The likelihood that only a relatively small number of mutations will cause paclitaxel resistance is indicated by the observation that a random mutagenesis approach to find new mutations is recapitulating mutations that have already been found by classical genetics, and by the observation that mutations reported in different laboratories using different cell lines are beginning to show overlap. New mutants recently identified by the inventor in both CHO cells, and in the human KB3 cervical carcinoma cell line, are summarized in Table m. The fact that human mutations fall into the same region as the CHO mutations in the tertiary structure, combined with the observation that some mutations (not reported in this application) in CHO cells affect residues that are altered in human cell lines, supports the conclusion (based on identical amino acid sequences for β-tubulin in the two species) that mutations identified in CHO cells are expected to confer drug resistance in human cells. The nucleotide sequences encoding the new mutants are shown in Table III. 3 TABLE III Thereafter, Table III is repesented on page 4.

[0224] It is also disclosed in published United States patent application 2003/0235855 (commencing at page 4 thereof) that: “The new corresponding mutant CHO β-tubulin, protein sequences (see Table IV) are: I210T (Ile to Thr at location 210) (Seq. No. 39), L217N (Leu to Asn at location 217) (Seq. No. 40), F270C (Phe to Cys at location 270) (Seq. No. 41) and Q292H (Gln to His at location 292) (Seq. No. 42). The new corresponding mutant human β-tubulin sequences are: L225M (Leu to Met at location 225) (Seq. No. 43), L273V (Leu to Val at location 273) (Seq. No. 44) and V365D (Val to Asp at location 365) (Seq. No. 45).” The aforementioned Seq. No. 39, 40, 41, 42, 43, 44, and 45 are listed in this application's sequence listing as SEQ. ID. No. 307, 308, 309, 310, 311, 312, and 313 respectively.

[0225] It is also disclosed in published United States patent application 2003/0235855 (commencing at page 4 thereof) that: “Table IV lists all of the nucleic acid and protein sequences in sequence order that are described in this application along with their sequence id number and abbreviated amino acid mutation.”Thereafter, Table IV is presented on pages 4 et seq.

[0226] It is also disclosed in United States published patent application 2003/0235855 (commencing at page 8 thereof) that: “Because α-tubulin and β-tubulin are similar proteins, similar clustering of mutations are anticipated in α-tubulin in paclitaxel resistant cells and α-tubulin PCR mutant primer sequences can be constructed in a similar manner to the primers presented herein for β-tubulin in paclitaxel resistant tumor cells.”

[0227] It is also disclosed in United States published patent application 2003/0235855 (commencing at page 8 thereof) that: “The assays of the present invention were performed using Chinese hamster ovary (CHO) cells selected for resistance to paclitaxel. It is important to note that human and hamster tubulin have identical amino acid sequences and the nucleotide sequences are highly homologous and the nucleotide differences do not alter the amino acid sequence, and therefore, the amino acid changes found in mutant CHO cells will also confer resistance in humans.”

[0228] It is also disclosed in United States published patent application 2003/0235855 (commencing at page 8 thereof) that: “It has been established that the most frequent mechanism of resistance to paclitaxel occurs through mutations in tubulin that affect the stability of the microtubules. These paclitaxel-resistant cells assemble less microtubule polymer and are frequently hypersensitive to other drugs such as vinblastine and vincristine that inhibit microtubule assembly.”

[0229] It is also disclosed in United States published patent application 2003/0235855 (commencing at page 8 thereof) that: “A model to explain these observations is provided in FIG. 1. The assay of the present invention can be used to identify many or most patients in danger of relapse due to tumor cell mutation and allow administration of alternate or additional treatment protocols using such agents as vinblastine or vincristine which are highly effective in eliminating the paclitaxel-resistant cells.”

[0230] It is also disclosed in United States published patent application 2003/0235855 (commencing at page 8 thereof) that: “The identification of the mutations and the clustering of mutations within the tubulin genes provide the data to construct highly efficient assays to detect these mutations in patients. Until now, there has been no method available to easily detect paclitaxel resistant cells in human tumors. The present methods or assays involve the design and use of allele-specific oligonucleotide primers for PCR.”

[0231] It is also disclosed in United States published patent application 2003/0235855 (commencing at page 8 thereof) that: “One such assay has been successfully confirmed for primers using the leu217 to arg mutation shown in FIG. 2. The wild-type primer (CTCCGTAGGTGGGCGTGGTGA (Seq. No.46)) is able to amplify wild-type DNA; but because of a 3′ mismatch with the mutant allele, it fails to amplify mutant DNA. Conversely, the mutant primer (CTCCGTAGGTGGGCGTGCGC (Seq. No. 47)) is able to amplify mutant DNA, but does not amplify the wild-type DNA because of 3′ mismatch (underlined). The mutant primer also contains an intentional mismatch to both wild-type and mutant DNA at the third nucleotide from the 3′ end (underlined) in order to enhance its allele specificity.” The aforementioned Seq. No. 46 and 47 are listed in this application's sequence listing as SEQ. ID. No. 314 and 315 respectively.

[0232] It is also disclosed in United States published patent application 2003/0235855 (commencing at page 8 thereof) that: “Thus, allele-specific primers covering most potential mutations can be used individually or a ‘cocktails’ to detect the mutations in a single or very few PCR reactions. Alternatively, assays involving restriction enzyme digestion or allele-specific hybridization using the mutant DNA sequences can be used, but may lack the sensitivity and simplicity of the PCR assay.”

[0233] It is also disclosed in United States published patent application 2003/0235855 (commencing at page 9 thereof) that: “The high frequency of mutations affecting only a few leucine residues of α-tubulin in paclitaxel-resistant mutants was unexpected. Currently, there is no rational basis for predicting how an individual patient will respond to paclitaxel therapy. An initial assay of the tumor for mutations in tubulin that confer paclitaxel resistance would help clinicians decide whether the patient is a good candidate for paclitaxel therapy and save needless morbidity with a treatment that is unlikely to be effective. It would also allow the clinician to choose an alternative or additional therapy at an early time in the disease progression, thereby enhancing the survival of the patient.”

[0234] It is also disclosed in United States published patent application 2003/0235855 (commencing at page 9 thereof) that: “Mammals express 6 α- and 6 β-tubulin genes, which are the targeted genes. To further optimize assays, it may be necessary to determine which tubulin isotype is involved in paclitaxel resistance for each type of tumor in certain instances. The tubulin is expressed in a tissue specific manner, with some forms restricted to certain tissues, which are widely disclosed in the prior art literature. Furthermore, the present inventors have found in CHO cells that the most abundant tubulin isotype is the one always involved in conferring resistance, which was completely unexpected. Thus, one skilled in the art must merely find the most abundant isotype for each type of tumor, which is disclosed in many technical journal and prior art references.”

[0235] It is also disclosed in United States published patent application 2003/0235855 (commencing at page 9 thereof) that: “Paclitaxel is the prototype for a novel class of agents that inhibit cells in mitosis by promoting and stabilizing microtubule assembly. Early studies with this compound demonstrated that it binds to microtubules in a 1:1 stoichiometry with tubulin heterodimers (Manfredi, J. J., Parness, J., and Horwitz, S. B. (1981) J. Cell Biol. 94, 688-696) and inhibits microtubule disassembly. It is also able to induce microtubule assembly both in vitro and in vivo and induces microtubule bundle formation in treated cells (Schiff, P. B., Fant, J., and Horwitz, S. B. (1979) Nature 277, 665-667 and Schiff, P. B., and Horwitz, S. B. (1980) Proc. Natl. Acad. Sci. U.S.A. 77,1561-1565). Recent interest in this and related compounds has been fueled by clinical studies demonstrating remarkable activity of paclitaxel against a number of malignant diseases (Rowinsky, E. K., and Donehower, R. C. (1995) N. E. J. Med. 332,1004-1014). Although still in clinical trials, the demonstrated activity of paclitaxel in phase II studies has led to FDA approval for its use in refractory cases of breast and ovarian cancer. As more patients are treated with this drug, clinical resistance is expected to become an increasingly significant problem.”

[0236] It is also disclosed in United States published patent application 2003/0235855 (commencing at page 9 thereof) that: “The mechanisms by which tumor cells acquire resistance to paclitaxel are not fully understood. Cell culture studies have shown that paclitaxel is a substrate for the multidrug resistance pump (gP170), and cells selected for high levels of resistance to the drug have increased gP170 (Casazza, A. M., and Fairchild, C. R. (1996) Cancer Treatment & Research 87, 149-71). Nevertheless, it has yet to be demonstrated that this mechanism is significant in paclitaxel refractory tumors. Indeed, the remarkable efficacy of paclitaxel in early clinical studies of patients who were pretreated with Adriamycin, a well known substrate for gP170, argues that the multidrug resistance (mdr) phenotype may not be as clinically prevalent as had initially been anticipated (Schiff, P. B., and Horwitz, S. B. (1980) Proc. Natl. Acad. Sci. U.S.A. 77, 1561-1565).”

[0237] It is also disclosed in United States published patent application 2003/0235855 (commencing at page 9 thereof) that: “Additional mechanisms of resistance to paclitaxel have been reported. For example, several laboratories have provided evidence that changes in the expression of specific β-tubulin genes are associated with paclitaxel resistance in cultured tumor cell lines (Haber, M., Burkhart, C. A., Regl, D. L., Madafiglio, J., Norris, M. D., and Horwitz, S. B. (1995) J. Biol. Chem. 270, 31269-75; Jaffrezou, J. P., Dumontet, C., Derry, W. B., Duran, G., Chen, G., Tsuchiya, E., Wilson, L., Jordan, M. A., and Sikic, B. I. (1995) Oncology Res. 7, 517-27; Kavallaris, M., Kuo, D. Y. S., Burkhart, C. A., Regl, D. L., Norris, M. D., Haber, M., and Horwitz, S. B. (1997) J. Clin. Invest. 100, 1282-93; and Ranganathan, S., Dexter, D. W., Benetatos, C. A., and Hudes, G. R. (1998) Biochim. Biophys. Acta 1395, 237-245). More recently, a report describing mutations in β-tubulin that make the protein unresponsive to paclitaxel has appeared (Giannakakou, P., Sackett, D. L., Kang, Y.-K., Zhan, Z., Buters, J. T. M., Fojo, T., and Poruchynsky, M. S. (1997) J. Biol. Chem. 272,17118-17125). To date, however, there is little evidence that any of the mechanisms described in cell culture cause paclitaxel resistance in human tumors.”

[0238] It is also disclosed in United States published patent application 2003/0235855 (commencing at page 9 thereof) that “The inventor's own studies have described a resistance mechanism mediated by tubulin alterations that affect microtubule assembly (Cabral, F., and Barlow, S. B. (1991) Pharmac. Ther. 52, 159-171). Based on mutant properties and drug cross-resistance patterns, it is proposed that these changes in microtubule assembly could compensate for the presence of the drug (Cabral, F., Brady, R. C., and Schibler, M. J. (1986) Ann. N.Y. Acad. Sci. 466, 745-756). The inventors were later able to directly demonstrate that paclitaxel resistant Chinese hamster ovary (CHO) cells have diminished microtubule assembly compared to wild-type controls (Minotti, A. M., Barlow, S. B., and Cabral, F. (1991) J. Biol. Chem. 266, 3987-3994). Thus, isolation of paclitaxel resistant mutants provides an opportunity to study mutations that not only give information about the mechanisms of drug action and resistance, but also give structural information about regions of tubulin that are involved in assembly.”

[0239] It is also disclosed in United States published patent application 2003/0235855 (commencing at page 10 thereof) that: “The inventors have now sequenced 9 mutant β-tubulin alleles and find that the mutations cluster at a site that is likely to be involved in lateral or longitudinal interactions during microtubule assembly. Remarkably, these mutations are present in the H6H7 region of of tubulin. Previously, it was believed that this region was not associated with paclitaxel binding. However, the inventors have isolated mutants in the H6H7 region, which are directly related to paclitaxel resistence.”

[0240] It is also disclosed in United States published patent application 2003/0235855 (commencing at page 10 thereof) that: “There is some significance to the fact that all the mutated residues are leucines—it certainly indicates that the changes that produce taxol resistance are not random. One possibility is that the leucines define a structural motif (e.g., analogous to a leucine zipper, but clearly distinct) that forms an interaction site with a neighboring subunit. A more trivial explanation is that the leucines are among the least critical residues in the region and are therefore better able to tolerate changes that produce the kind of subtle alterations in tubulin assembly that give resistance to taxol. The fact that the 3 leucines are highly conserved throughout all species and that the conservation extends to alpha and even gamma tubulin would tend to argue for the former alternative, but it will take a lot of further experimentation before the true significance can be elucidated.”

[0241] It is also disclosed in United States published patent application 2003/0235855 (commencing at page 10 thereof) that: “All 3 leucines in hamster are encoded by a CTC. Thus, a single base change can lead to substitution of histidine, arginine, phenylalanine, isoleucine, valine, or pro line. Only his, arg, and phe were isolated in the mutant cell lines. By transfection of cDNA altered by site-directed mutagenesis, is has been found that ile and val do not produce taxol resistance, probably because they do not perturb the structure of the microtubule sufficiently to produce resistance. Proline substitution can cause resistance, but appears to do so when expressed at very low levels. Moreover, the inventors have not been able to express it at high levels. This suggests that pro was not isolated in the mutant cell lines because it disrupts the structure of microtubules too severely for the cells to survive.”

[0242] It is also disclosed in United States published patent application 2003/0235855 (commencing at page 10 thereof) that: “The codons for leucine in human DNA are CTG at positions 215 and 217, and CTT at position 228. Single nucleotide changes will produce the same amino acid substitutions at 228, but a different set (valine, methionine, glutamine, arginine, or proline) at 215 and 217. Thus, 2 new possibilities (methionine and glutamine) might be found at 215 or 217 in human cells resistant to taxol. Of the two, methionine has been tested by transfection and it turns out to produce borderline resistance even at high levels of expression. A glutamine substitution has not yet been tested and should therefore be considered a presumptive candidate for producing resistance.”

A Preferred Anti-Mitotic Compound

[0243] In this section of the specification, a preferred compound is discussed. The preferred compound of this embodiment of the invention is an anti-mitotic compound. Anti-mitotic compounds are known to those skilled in the art. Reference may be had, e.g., to U.S. Pat. No. 6,723,858 (estrogenic compounds as anti-mitotic agents), U.S. Pat. No. 6,528,676 (estrogenic compounds as anti-mitotic agents), U.S. Pat. No. 6,350,777 (anti-mitotic agents which inhibit tubulin polyumerization), U.S. Pat. No. 6,162,930 (anti-mitotic agents which inhibit tubulin polymerization), U.S. Pat. No. 5,892,069 (estrogenic compounds as anti-mitotic agents), U.S. Pat. No. 5,886,025 (anti-mitotic agents which inhibit tubulin polymerization), U.S. Pat. No. 5,661,143 (estrogenic compounds as anti-mitotic agents), U.S. Pat. No. 3,997,506 (anti-mitotic derivatives of thiocolchicine), and the like. The entire disclosure of each of these United States patents applications is hereby incorporated by reference into this specification.

[0244] These prior art anti-mitotic agents may be modified, in accordance with the process of this invention, to make them “magnetic,” as that term is defined in this specification. In the next section of this specification, a process for modifying prior art taxanes to make them “magnetic” is described.

Preparation and use of Magnetic Taxanes

[0245] In this portion of the specification, applicants will describe the preparation of certain magnetic taxanes that may be used in one or more of the processes of his invention. The process that is ued to make such taxanes magnetic and/or water soluble may also be used to make other anti-mitotic compounds magnetic and/or water soluble.

[0246] In one embodiment of the invention, a biologically active substrate is linked to a magnetic carrier particle. An external magnetic field may then be used to increase the concentration of a magnetically linked drug at a predetermined location.

[chemical structure]

[0247] One method for the introduction of a magnetic carrier particle involves the linking of a drug with a magnetic carrier. While some naturally occurring drugs inherently carry magnetic particles (ferrimycin, albomycin, salmycin, etc.), it is more common to generate a synthetic analog of the target drug and attach the magnetic carrier through a linker.

Functionalized Taxanes

[0248] Paclitaxel and docetaxel are members of the taxane family of compounds. A variety of taxanes have been isolated from the bark and needles of various yew trees

[0249] In one embodiment of the invention, such a linker is covalently attached to at least one of the positions in taxane.

[chemical structure]

[0250] It is well known in the art that the northern hemisphere of taxanes has been altered without significant impact on the biological activity of the drug. Reference may be had to Chapter 15 of Taxane Anticancer Agents, Basic Science and Current Status, edited by G. George et al., ACS Symposium Series 583, 207^{th} National Meeting of the American Chemical Society, San Diego, Calif. (1994). Specifically the C-7, C-9, and C-10 positions of paclitaxel have been significantly altered without degrading the biological activity of the parent compound. Likewise the C-4 position appears to play only a minor role. The oxetane ring at C-4 to C-5 has been shown to be critical to biological activity. Likewise, certain functional groups on the C-13 sidechain have been shown to be of particular importance.

[0251] In one embodiment of the invention, a position within paclitaxel is functionalized to link a magnetic carrier particle. A number of suitable positions are presented below. It should be understood that paclitaxel is illustrated in the figures below, but other taxane analogs may also be employed. [chemical structure] [chemical structure]
Attachment at C-4

[0252] C-4 taxane analogs have been previously generated in the art. A wide range of methodologies exist for the introduction of a variety of substituents at the C-4 position. By way of illustration, reference may be had to “Synthesis and Biological Evaluation of Novel C-4 Aziridine-Bearing Paclitaxel Analogs” by S. Chen et al., J. Med. Chem. 1995, vol 38, pp 2263.

[chemical structure]

[0253] The secondary (C-13) and tertiary (C-1) alcohols of 7-TES baccatin were protected using the procedure of Chen (J. Org. Chem. 1994, vol 59, p 6156) while simultaneously unmasking the alcohol at C-4. The resulting product was treated with a chloroformate to yield the corresponding carboxylate. Removal of the silyl protecting groups at C-1, C-7, and C-13, followed by selective re-protection of the C-7 position gave the desired activated carboxylate. The compound was then treated with a suitable nucleophile (in the author's case, ethanolamine) to produce a C-4 functionalized taxane. The C-13 sidechain was installed using standard lactam methodology.

[0254] This synthetic scheme thus provides access to a variety of C-4 taxane analogs by simply altering the nucleophile used. In one embodiment of the instant invention, the nucleophile is selected so as to allow the attachment of a magnetic carrier to the C-4 position.

Attachment at C-7

[0255] The C-7 position is readily accessed by the procedures taught in U.S. Pat. No. 6,610,860. The alcohol at the C-10 position of 10-deacetylbaccatin III was selectively protected. The resulting product was then allowed to react with an acid halide to produce the corresponding ester by selectively acylating the b-7 position over the C-13 alcohol. Standard lactam methodology allowed the installation of the C-13 sidechain. In another embodiment, baccatin III, as opposed to its deacylated analog, is used as the starting material.

[chemical structure]

[0256] Other C-7 taxane analogs are disclosed in U.S. Pat. Nos. 6,610,860; 6,359,154; and 6,673,833, the contents of which are hereby incorporated by reference.

Attachment at C-9

[0257] It has been established that the C-9 carbonyl of paclitaxel is relatively chemically inaccessible, although there are exceptions (see, for example, Tetrahedron Lett. Vol 35, p 4999). However, scientists gained access to C-9 analogs when 13-acetyl-9-dihydrobaccatin III was isolated from Taxus candidensis (see J. Nat. Products, 1992, vol 55, p 55 and Tetrahedron Lett. 1992, vol 33, p 5173). This triol is currently used to provide access to a variety of such C-9 analogues.

[0258] In chapter 20 of Taxane Anticancer Agents, Basic Science and Current Status, (edited by G. George et al., ACS Symposium Series 583, 207^{th} National Meeting of the American Chemical Society, San Diego, Calif. (1994)) Klein describes a number of C-7/C-9 taxane analogs. One of routes discussed by Klein begins with the selective deacylation of 13-acetyl-9-dihydrobaccatin I, II, followed by the selective protection of the C7 alcohol as the silyl ether. A standard lactam coupling introduced the C-13 sidechain. The alcohols at C-7 and C-9 were sufficiently differentiated to allow a wide range of analogs to be generated. “In contrast to the sensitivity of the C-9 carbonyl series under basic conditions, the 9(R)-dihydro system can be treated directly with strong base in order to alkylate the C-7 and/or the C-9 hydroxyl groups.”

[chemical structure]

[0259] One skilled in the art may adapt Klein's general procedures to install a variety of magnetic carriers at these positions. Such minor adaptations are routine for those skilled in the art.

Attachment at C-7 and C-9

[0260] Klein also describes a procedure wherein 13-acetyl-9-dihydrobaccatin III is converted to 9-dihydrotaxol. Reference may be had to “Synthesis of 9-Dihydrotaxol: a Novel Bioactive Taxane” by L. L. Klein in Tetrahedron Lett. Vol 34, pp 2047-2050. An intermediate in this synthetic pathway is the dimethylketal of 9-dihydrotaxol.

[chemical structure]

[0261] In one embodiment, the procedure of Klein is followed with a carbonyl compound other than acetone to bind a wide variety of groups to the subject ketal. Supplemental discussion of C-9 analogs is found in “Synthesis of 9-Deoxotaxane Analogs” by L. L. Klein in Tetrahedron Lett. Vol 35, p 4707 (1994).

Attachment at C-10

[0262] In one embodiment of the invention, the C-10 position is functionalized using the procedure disclosed in U.S. Pat. No. 6,638,973. This patent teaches the synthesis of paclitaxel analogs that vary at the C-10 position. A sample of 10-deacetylbaccatin III was acylated by treatment with propionic anhydride. The C-13 sidechain was attached using standard lactam methodology after first performing a selective protection of the secondary alcohol at the C-7 position. In one embodiment of the invention, this procedure is adapted to allow access to a variety of C-10 analogues of paclitaxel.

[chemical structure]

[0263] In one embodiment an anhydride is used as an electrophile. In another embodiment, an acid halide is used. As would be apparent to one of ordinary skill in the art, a variety of electrophiles could be employed. [chemical structure]
Siderophores

[0264] In one embodiment, a member of the taxane family of compounds is attached to a magnetic carrier particle. Suitable carrier particles include siderophores (both iron and non-iron containing), nitroxides, as well as other magnetic carriers.

[0265] Siderophores are a class of compounds that act as chelating agents for various metals. Most organisms use siderophores to chelate iron (III) although other metals may be exchanged for iron (see, for example, Exchange of Iron by Gallium in Siderophores by Emergy, Biochemistry 1986, vol 25, pages 4629-4633). Most of the siderophores known to date are either catecholates or hydroxamic acids.

[chemical structure]

[0266] Representative examples of catecholate siderophores include the albomycins, agrobactin, parabactin, enterobactin, and the like.

[chemical structure]

[0267] Examples of hydroxamic acid-based siderophores include ferrichrome, ferricrocin, the albomycins, ferrioxamines, rhodotorulic acid, and the like. Reference may be had to Microbial Iron Chelators as Drug Delivery Agents by M. J. Miller et al., Acc. Chem. Res. 1993, vol 26, pp 241-249; Structure of Des(diserylglycyl)ferrirhodin, DDF, a Novel Siderophore from Aspergillus ochraceous by M. A. F. Jalal et al., J. Org. Chem. 1985, vol 50, pp5642-5645; Synthesis and Solution Structure of Microbial Siderophores by R. J. Bergeron, Chem. Rev. 1984, vol 84, pp 587-602; and Coordination Chemistry and Microbial Iron Transport by K. N. Raymond, Acc. Chem. Res., 1979, vol 12, pp 183-190. The synthesis of a retrohydroxamate analog of ferrichrome is described by R. K. Olsen et al. in J. Org. Chem. 1985, vol 50, pp 2264-2271.

[chemical structure]

[0268] In “Total Synthesis of Desferrisalmycin” (M. J. Miller et al. in J. Am. Chem. Soc. 2002, vol 124 pp 15001-15005), a natural product is synthesized that contains a siderophore. The author states “siderophores are functionally defined as low molecular mass molecules which acquire iron (III) from the environment and transport it into microganisms. Because of the significant roles they play in the active transport of physiologically essentially iron (III) through microbe cell members, it is not surprising that siderophores-drug conjugates are attracting more and more attention from both medicinal chemists and clinical researchers as novel drug delivery systems in the war against microbial infections, especially in an area of widespread emergency of multidrug-resistance (MDR) strains. There have been three families of compounds identified as natural siderophore-drug conjugates, including ferrimycin, albomycin, and salmycin.” In a related paper, Miller describes the use of siderophores as drug delivery agents (Acc. Chem. Res. 1993, vol 26, pp 241-249. Presumably, the siderophore acts as a “sequestering agents [to] facilitate the active transport of chelated iron into cells where, by modification, reduction, or siderophore decomposition, it is released for use by the cell.” Miller describes the process of tethering a drug to a sidrophore to promote the active transport of the drug across the cell membrane.

[0269] In “The Preparation of a Fully Differentiated ‘Multiwarhead’ Sidrophore Precursor”, by M. J. Miller et al (J. Org. Chem. 2003, vol 68, pp 191-194) a precursor is disclosed which allows for a drug to be tethered to a sidrophore. In one embodiment, the route disclosed by Miller is employed to provide a variety of siderophores of similar structure. The synthesis of similar hydroxamic acid-based siderophores is discussed in J. Org. Chem. 2000, vol 65 (Total Synthesis of the Siderophore Danoxamine by M. J. Miller et al.), pp 4833-4838 and in the J. of Med. Chem. 1991, vol 32, pp 968-978 (by M. J. Miller et al.).

[0270] A variety of fluorescent labels have been attached to ferrichrome analogues in “Modular Fluorescent-Labeled Siderophore Analogues” by A. Shanzer et al. in J. Med. Chem. 1998, vol 41,1671-1678. The authors have developed a general methodology for such attachments.

[chemical structure]

[0271] As discussed above, functionalized ferrichrome analogs have been previous generated, usually using basic amine acids (glycine). In one embodiment, functionality is introduced using an alternative amine acid (such as serine) in place of the central glycine residue. This provides a functional group foothold from which to base a wide variety of analogs. Using traditional synthetic techniques, various linkers are utilized so as to increase or decrease the distance between the magnetic carrier and the drug.

[chemical structure]

[0272] As would be apparent to one of ordinary skill in the art, the above specified techniques are widely applicable to a variety of substrates. By way of illustration, and not limitation, a number of magnetic taxanes are shown below. [chemical structure] [chemical structure]
Nitroxides

[0273] Another class of magnetic carriers is the nitroxyl radicals (also known as nitroxides). Nitroxyl radicals a “persistent” radials that are unusually stable. A wide variety of nitroxyls are commercially available. Their paramagnetic nature allows them to be used as spin labels and spin probes.

[chemical structure]

[0274] In addition to the commercially available nitroxyls, other paramagnetic radical labels have been generated by acid catalyzed condensation with 2-Amino-2-methyl-1-propanol followed by oxidation of the amine.

[chemical structure]

[chemical structure]

[0275] One of ordinary skill in the art could use the teachings of this specification to generate a wide variety of suitable carrier-drug complexes. The following table represents but a small sampling of such compounds.

[chemical structure]

[chemical structure]

| | |
|---|---|
| [chemical structure] | [chemical structure] |

| | | |
|---|---|---|
| [chemical structure] | [chemical structure] | [chemical structure] |

| R1 | R2 | R3 | R4 |
|---|---|---|---|
| F1, Y = CH2, | H | Ac | COPh |
| n = 0 to 20 | | | |
| Ac | F1, Y = CH2, | Ac | COPh |
| | n = 0 to 20 | | |
| Ac | H | F1, Y = CH2, | COPh |
| | | n = 0 to 20 | |
| Ac | H | Ac | F1, Y = CH2, |
| | | | n = 0 to 20 |
| H | H | Ac | Boc |
| F1, Y = CH2, | H | Ac | Boc |
| n = 0 to 20 | | | |
| H | F1, Y = CH2, | Ac | Boc |
| | n = 0 to 20 | | |
| H | H | F1, Y = CH2, | Boc |
| | | n = 0 to 20 | |
| H | H | Ac | F1, Y = CH2, |
| | | | n = 0 to 20 |
| F1, Y = NH or | H | Ac | COPh |
| NR, n = 0 to 20 | | | |
| Ac | F1, Y = NH or | Ac | COPh |
| | NR, n = 0 to 20 | | |
| Ac | H | F1, Y = NH or | COPh |
| | | NR, n = 0 to 20 | |
| Ac | H | Ac | F1, Y = NH or |
| | | | NR, n = 0 to |
| | | | 20 |
| H | H | Ac | Boc |
| F1, Y = NH or | H | Ac | Boc |
| NR, n = 0 to 20 | | | |
| H | F1, Y = NH or | Ac | Boc |
| | NR, n = 0 to 20 | | |
| H | H | F1, Y = NH or | Boc |
| | | NR, n = 0 to 20 | |
| H | H | Ac | F1, Y = NH or |
| | | | NR, n = 0 to |
| | | | 20 |
| N1, n = to 20 | H | Ac | COPh |
| Ac | N1, n = to 20 | Ac | COPh |
| Ac | H | N1, n = to 20 | COPh |
| Ac | H | Ac | N1, n = to 20 |
| H | H | Ac | Boc |
| N1, n = to 20 | H | Ac | Boc |
| H | N1, n = to 20 | Ac | Boc |
| H | H | N1, n = to 20 | Boc |
| H | H | Ac | N1, n = to 20 |
| N2, n = 0 to 20, | H | Ac | COPh |
| X = O or NH | | | |
| Ac | N2, n = 0 to 20, | Ac | COPh |
| | X = O or NH | | |
| Ac | H | N2, n = 0 to 20, | COPh |
| | | X = O or NH | |
| Ac | H | Ac | N2, n = 0 to |
| | | | 20, X = O or |
| | | | NH |
| H | H | Ac | Boc |
| N2, n = 0 to 20, | H | Ac | Boc |
| X = O or NH | | | |
| H | N2, n = 0 to 20, | Ac | Boc |
| | X = O or NH | | |
| H | H | N2, n = 0 to 20, | Boc |
| | | X = O or NH | |
| H | H | Ac | N2, n = 0 to |
| | | | 20, X = O or |
| | | | NH |
| N3, n = 0 to 20, | H | Ac | COPh |
| X = O or NH | | | |
| Ac | N3, n = 0 to 20, | Ac | COPh |
| | X = O or NH | | |
| Ac | H | N3, n = 0 to 20, | COPh |
| | | X = O or NH | |
| Ac | H | Ac | N3, n = 0 to |
| | | | 20, X = O or |
| | | | NH |
| H | H | Ac | Boc |
| N3, n = 0 to 20, | H | Ac | Boc |
| X = O or NH | | | |
| H | N3, n = 0 to 20, | Ac | Boc |
| | X = O or NH | | |
| H | H | N3, n = 0 to 20, | Boc |
| | | X = O or NH | |
| H | H | Ac | N3, n = 0 to |
| | | | 20, X = O or |
| | | | NH |
| F2 or F3 | H | Ac | COPh |
| Ac | F2 or F3 | Ac | COPh |
| Ac | H | F2 or F3 | COPh |
| Ac | H | Ac | F2 or F3 |
| F2 or F3 | H | Ac | Boc |
| H | F2 or F3 | Ac | Boc |
| H | H | F2 or F3 | Boc |
| H | H | Ac | F2 or F3 |

[0276] The prior disclosure illustrates how one may modify prior art taxanes to make them magnetic. As will be apparent to those skilled in the art, one may similarly modify other modifiable prior art anti-mitotic compounds to make them magnetic.

Other Modifiable Prior Art Compounds

[0277] Many anti-mitotic compounds that may be modified in accordance with the process of this invention are described in the prior art. One of these compounds is discodermolide; and it is described in U.S. Pat. No. 6,541,509, the entire disclosure of which is hereby incorporated by reference into this specification. Reference may be had, e.g., to column 10 of such paent and to the references 10, 11, 12, and 13 cited in such patent.

[0278] The reference 12 in U.S. Pat. No. 6,541,509 is to an article by R. J. Kowalski et al., “The Microtubule-Stabilizing Agent Discodermolide Competitively Inhibits the Binding of Paclitaxel(Taxol) to Tubulin Monomers, . . . ” Mol. Pharacol. 52:613-22, 1997. At page 2 of the Kowalski et al. patent, a formula for discodermolide is presented with 29 numbered carbon atoms (see FIG. 1).

[0279] Elsewhere in this specification, applicants teach how to make “magnetic taxanes” by incorporating therein various linker groups and/or siderophores. The same linker groups and/or siderphores may be utilized via subsgtantially the same process to make the discodermolide magnetic in the same manner.

[0280] As is disclosed elsewhere in this specification, siderphores are a class of compounds that act as chelating agents for various metals. When used to make “magnetic taxanes,” they are preferably bound to either the C7 and/or the C10 carbons of the paclitaxels. They can similarly be used to make “magnetic discodermolides,” but in this latter case they should be bonded at the C17 carbon of discodermolide, to which a hydroxyl group is bound. The same linker that is used to link the C7/C10 carbon of the taxane to the siderphore may also be sued to link the C17 carbon of the discodermolde to the siderphore.

[0281] In one embodiment, the “siderohophoric group” disclosed in U.S. Pat. No. 6,310,058, the entire disclosure of which is hereby incorporated by reference into this specification, is utilized. The siderophoric group is of the formula—(CH2)ₘ—N(OH)—C(O)—(CH₂)ₙ—(CH═CH)ₒ—CH3, wherein m is an integer of from 2 to 6, n is 0 or an integer of from 1 to 22, and o is 0 or an integer 1 to 4, provided that m+o is no greater than 25.

[0282] In another embodiment, “magentic epothilone A” and/or “magentic epotilone B” is also made by a similar process. As is also disclosed in the FIG. 1 of the Kowalski et al. article (see page 614), and in the formula depicted, the epothilone A exists when, in such formula, the alkyl group (“R”) is hydrogen, whereas the epothilone B exists when, in such formula, the alkyl group is methyl. In either case, one can make magnetic analogs of these compounds by using the same siderophores and the same linkers groups but utilzing them at a different site. One may bind such siderophores at either the number 3 carbon (which which a hydroxyl group is bound) and/or the number 7 carbon (to which another hydroxyl group is bound.).

[0283] Without wishing to be bound to any particular theory, applicants believe that the binding of the siderphores at the specified carbon sites imparts the required magnetic properties to such modified materials without adversely affecting the anti-mitotic properteis of the material. In fact, in some embodiment, the anti-mitotic properties of the modified magnetic materials surpass the anti-mitotic properties of the unmodified materials.

[0284] This is unexpected; for, if the same linker groups and/or siderophores are used to bind to other than the specified carbon atoms, materials with no or subtantially poorer anti-mitotic properties are produced.

[0285] Thus, e.g., and referring to the magnetic taxanes described elsewhere in this speficification (and also to FIG. 1 of the Kowalski et al. article), one should not link such siderphores to to any carbons on the pendant aromatic rings. Thus, e.g., and referring to the discodermolide structure, one should not link siderphores to any of 1, 2, 3, or 4 carbon atoms. Thus, e.g., and referring to the epothilones, one should not link the siderphores to any carbonon the ring structure containing sulfur and nitrogen.

[0286] By way of further illustration, and referring to U.S. Pat. Nos. 5,504,074, 5,661,143, 5,892,069, 6,528,676, and 6,723,858 (the entire disclosure of each of which is hereby incorporated by reference into this specification), one may modify estradiol and estradiol metabolites to make them magnetic in accordance with the process of this invention. As is disclosed in U.S. Pat. No. 6,723,858 (the entire disclosure of which is hereby incorporated by reference into this specification, “Cell mitosis is a multi-step process that includes cell division and replication (Alberts, B. et al. In The Cell, pp. 652-661 (1989); Stryer, E. Biochemistry (1988)). Mitosis is characterized by the intracellular movement and segregation of organelles, including mitotic spindles and chromosomes. Organelle movement and segregation are facilitated by the polymerization of the cell protein tubulin. Microtubules are formed from .alpha. and β tubulin polymerization and the hydrolysis of guanosine triphosphate (GTP). Microtubule formation is important for cell mitosis, cell locomotion, and the movement of highly specialized cell structures such as cilia and flagella.”

[0287] As is also disclosed in U.S. Pat. No. 6,723,858, “Microtubules are extremely labile structures that are sensitive to a variety of chemically unrelated anti-mitotic drugs. For example, colchicine and nocadazole are anti-mitotic drugs that bind tubulin and inhibit tubulin polymerization (Stryer, E. Biochemistry (1988)). When used Cell mitosis is a multi-step process that includes cell division and replication (Alberts, B. et al. In The Cell, pp. 652-661 (1989); Stryer, E. Biochemistry (1988)). Mitosis is characterized by the intracellular movement and segregation of organelles, including mitotic spindles and chromosomes. Organelle movement and segregation are facilitated by the polymerization of the cell protein tubulin. Microtubules are formed from .alpha. and β tubulin polymerization and the hydrolysis of guanosine triphosphate (GTP). Microtubule formation is important for cell mitosis, cell locomotion, and the movement of highly specialized cell structures such as cilia and flagella. Microtubules are extremely labile structures that are sensitive to a variety of chemically unrelated anti-mitotic drugs. For example, colchicine and nocadazole are anti-mitotic drugs that bind tubulin and inhibit tubulin polymerization (Stryer, E. Biochemistry (1988)). When used alone or in combination with other therapeutic drugs, colchicine may be used to treat cancer (WO-9303729-A, published Mar. 4, 1993; J 03240726-A, published Oct. 28, 1991), alter neuromuscular function, change blood pressure, increase sensitivity to compounds affecting sympathetic neuron function, depress respiration, and relieve gout (Physician's Desk Reference, Vol. 47, p. 1487, (1993)).”

[0288] As is also disclosed in U.S. Pat. No. 6,723,858, “Estradiol and estradiol metabolites such as 2-methoxyestradiol have been reported to inhibit cell division (Seegers, J. C. et al. J. Steroid Biochem. 32, 797-809 (1989); Lottering, M-L. et al. Cancer Res. 52, 5926-5923(1992); Spicer, L. J. and Hammond, J. M. Mol. and Cell. Endo. 64,119-126 (1989); Rao, P. N. and Engelberg, J. Exp. Cell Res. 48, 71-81 (1967)). However, the activity is variable and depends on a number of in vitro conditions. For example, estradiol inhibits cell division and tubulin polymerization in some in vitro settings (Spicer, L. J. and Hammond, J. M. Mol. and Cell. Endo. 64, 119-126 (1989); Ravindra, R., J. Indian Sci. 64 (c) (1983)), but not in others (Loffering, M-L. et al. Cancer Res. 52, 5926-5923 (1992); Ravindra, R., J. Indian Sci. 64 (c) (1983)). Estradiol metabolites such as 2-methoxyestradiol will inhibit cell division in selected in vitro settings depending on whether the cell culture additive phenol red is present and to what extent cells have been exposed to estrogen. (Seegers, J. C. et al. Joint NCI-IST Symposium. Biology and Therapy of Breast Cancer. Sep. 25, Sep. 27, 1989, Genoa, Italy, Abstract A 58). alone or in combination with other therapeutic drugs, colchicine may be used to treat cancer (WO-09303729-A, published Mar. 4, 1993; J 03240726-A, published Oct. 28, 1991), alter neuromuscular function, change blood pressure, increase sensitivity to compounds affecting sympathetic neuron function, depress respiration, and relieve gout (Physician's Desk Reference, Vol. 47, p. 1487, (1993)).

[0289] As is also disclosed in U.S. Pat. No. 6,723,858, estradiol and estradiol metabolites such as 2-methoxyestradiol have been reported to inhibit cell division (Seegers, J. C. et al. J. Steroid Biochem. 32, 797-809 (1989); Lottering, M-L. et al. Cancer Res. 52, 5926-5923(1992); Spicer, L. J. and Hammond, J. M. Mol. and Cell. Endo. 64,119-126 (1989); Rao, P. N. and Engelberg, J. Exp. Cell Res. 48, 71-81 (1967)). However, the activity is variable and depends on a number of in vitro conditions. For example, estradiol inhibits cell division and tubulin polymerization in some in vitro settings (Spicer, L. J. and Hammond, J. M. Mol. and Cell. Endo. 64, 119-126 (1989); Ravindra, R., J. Indian Sci. 64 (c) (1983)), but not in others (Lottering, M-L. et al. Cancer Res. 52, 5926-5923 (1992); Ravindra, R., J. Indian Sci. 64 (c) (1983)). Estradiol metabolites such as 2-methoxyestradiol will inhibit cell division in selected in vitro settings depending on whether the cell culture additive phenol red is present and to what extent cells have been exposed to estrogen. (Seegers, J. C. et al. Joint NCI-IST Symposium. Biology and Therapy of Breast Cancer. Sep. 25, Sep. 27, 1989, Genoa, Italy, Abstract A 58).

[0290] In one preferred embodiment, the modifiable anti-mitotic agent is an anti-microtubule agent. In one aspect of this embodiment, and referring to U.S. Pat. No. 6,689,803 at columns 5-6 thereof (the entire disclosure of which patent is hereby incorporated by reference into this specification), representative anti-microtubule agents include, e.g., “ . . . taxanes (e.g., paclitaxel and docetaxel), campothecin, eleutherobin, sarcodictyins, epothilones A and B, discodermolide, deuterium oxide (D₂O), hexylene glycol (2-methyl-2,4-pentanediol), tubercidin (7-deazaadenosine), LY290181 (2-amino-4-(3-pyridyl)-4H-naphtho(1,2-b)pyran-3-cardonitrile), aluminum fluoride, ethylene glycol bis-(succinimidylsuccinate), glycine ethyl ester, nocodazole, cytochalasin B, colchicine, colcemid, podophyllotoxin, benomyl, oryzalin, majusculamide C, demecolcine, methyl-2-benzimidazolecarbamate (MBC), LY195448, subtilisin, 1069C85, steganacin, combretastatin, curacin, estradiol, 2-methoxyestradiol, flavanol, rotenone, griseofulvin, vinca alkaloids, including vinblastine and vincristine, maytansinoids and ansamitocins, rhizoxin, phomopsin A, ustiloxins, dolastatin 10, dolastatin 15, halichondrins and halistatins, spongistatins, cryptophycins, rhazinilam, betaine, taurine, isethionate, HO-221, adociasulfate-2, estramustine, monoclonal anti-idiotypic antibodies, microtubule assembly promoting protein (taxol-like protein, TALP), cell swelling induced by hypotonic (190 mosmol/L) conditions, insulin (100 nmol/L) or glutamine (10 mmol/L), dynein binding, gibberelin, XCHO1 (kinesin-like protein), lysophosphatidic acid, lithium ion, plant cell wall components (e.g., poly-L-lysine and extensin), glycerol buffers, Triton X-100 microtubule stabilizing buffer, microtubule associated proteins (e.g., MAP2, MAP4, tau, big tau, ensconsin, elongation factor-1-alpha (EF-1.alpha.) and E-MAP-115), cellular entities (e.g., histone H1, myelin basic protein and kinetochores), endogenous microtubular structures (e.g., axonemal structures, plugs and GTP caps), stable tubule only polypeptide (e.g., STOP145 and STOP220) and tension from mitotic forces, as well as any analogues and derivatives of any of the above. Within other embodiments, the anti-microtubule agent is formulated to further comprise a polymer.”

[0291] The term “anti-microtubule,” as used in this specification (and in the specification of U.S. Pat. No. 6,689,803), refers to any “ . . . protein, peptide, chemical, or other molecule which impairs the function of microtubules, for example, through the prevention or stabilization of polymerization. A wide variety of methods may be utilized to determine the anti-microtubule activity of a particular compound, including for example, assays described by Smith et al. (Cancer Lett 79(2):213-219, 1994) and Mooberry et al., (Cancer Lett. 96(2):261-266, 1995);” see, e.g., lines 13-21 of column 14 of U.S. Pat. No. 6,689,803. One preferred method, utilizing the anti-mitotic factor, is described in this specification.

[0292] An extensive listing of anti-microtubule agents is provided in columns 14, 15, 16, and 17 of U.S. Pat. No. 6,689,803; and one or more of them may be modified them in accordance with the process of this invention to make them magnetic. These anti-microtubule agents include “ . . . taxanes (e.g., paclitaxel (discussed in more detail below) and docetaxel) (Schiff et al., Nature 277: 665-667, 1979; Long and Fairchild, Cancer Research 54: 4355-4361, 1994; Ringel and Horwitz, J. Natl. Cancer Inst. 83(4): 288-291, 1991; Pazdur et al., Cancer Treat. Rev. 19(4): 351-386, 1993), campothecin, eleutherobin (e.g., U.S. Pat. No. 5,473,057), sarcodictyins (including sarcodictyin A), epothilones A and B (Bollag et al., Cancer Research 55: 2325-2333, 1995), discodermolide (ter Haar et al., Biochemistry 35: 243-250, 1996), deuterium oxide (D2O) (James and Lefebvre, Genetics 130(2): 305-314, 1992; Sollott et al., J. Clin. Invest. 95: 1869-1876, 1995), hexylene glycol (2-methyl-2,4-pentanediol) (Oka et al., Cell Struct. Funct. 16(2): 125-134, 1991), tubercidin (7-deazaadenosine) (Mooberry et al., Cancer Lett. 96(2): 261-266, 1995), LY290181 (2-amino-4-(3-pyridyl)-4H-naphtho(1,2-b)pyran-3-cardonitrile) (Panda et al., J. Biol. Chem. 272(12): 7681-7687, 1997; Wood et al., Mol. Pharmacol. 52(3): 437-444, 1997), aluminum fluoride (Song et al., J. Cell. Sci. Suppl. 14: 147-150, 1991), ethylene glycol bis-(succinimidylsuccinate) (Caplow and Shanks, J. Biol. Chem. 265(15): 8935-8941, 1990), glycine ethyl ester (Mejillano et al., Biochemistry 31(13): 3478-3483, 1992), nocodazole (Ding et al., J. Exp. Med. 171(3): 715-727, 1990; Dotti et al., J. Cell Sci. Suppl. 15: 75-84, 1991; Oka et al., Cell Struct. Funct. 16(2): 125-134, 1991; Weimer et al., J. Cell. Biol. 136(1), 71-80, 1997), cytochalasin B (Illinger et al., Biol. Cell 73(2-3): 131-138, 1991), colchicine and CI 980 (Allen et al., Am. J. Physiol. 261(4 Pt. 1): L315-L321, 1991; Ding et al., J. Exp. Med. 171(3): 715-727, 1990; Gonzalez et al., Exp. Cell. Res. 192(1): 10-15, 1991; Stargell et al., Mol. Cell. Biol. 12(4): 1443-1450, 1992; Garcia et al., Antican. Drugs 6(4): 533-544, 1995), colcemid (Barlow et al., Cell. Motil. Cytoskeleton 19(1): 9-17, 1991; Meschini et al., J. Microsc. 176(Pt. 3): 204-210, 1994; Oka et al., Cell Struct. Funct. 16(2): 125-134, 1991), podophyllotoxin (Ding et al., J. Exp. Med. 171(3): 715-727, 1990), benomyl (Hardwick et al., J. Cell. Biol. 131(3): 709-720, 1995; Shero et al., Genes Dev. 5(4): 549-560, 1991), oryzalin (Stargell et al., Mol. Cell. Biol. 12(4): 1443-1450, 1992), majusculamide C (Moore, J. Ind. Microbiol. 16(2): 134-143, 1996), demecolcine (Van Dolah and Ramsdell, J. Cell. Physiol. 166(1): 49-56, 1996; Wiemer et al., J. Cell. Biol. 136(1): 71-80, 1997), methyl-2-benzimidazolecarbamate (MBC) (Brown et al., J. Cell. Biol. 123(2): 387-403, 1993), LY195448 (Barlow & Cabral, Cell Motil. Cytoskel. 19: 9-17, 1991), subtilisin (Saoudi et al., J. Cell Sci. 108: 357-367, 1995), 1069C85 (Raynaud et al., Cancer Chemother. Pharmacol. 35: 169-173, 1994), steganacin (Hamel, Med. Res. Rev. 16(2): 207-231, 1996), combretastatins (Hamel, Med. Res. Rev. 16(2): 207-231, 1996), curacins (Hamel, Med. Res. Rev. 16(2): 207-231, 1996), estradiol (Aizu-Yokata et al., Carcinogen. 15(9): 1875-1879, 1994), 2-methoxyestradiol (Hamel, Med. Res. Rev. 16(2): 207-231, 1996), flavanols (Hamel, Med. Res. Rev. 16(2): 207-231, 1996), rotenone (Hamel, Med. Res. Rev. 16(2): 207-231, 1996), griseofulvin (Hamel, Med. Res. Rev. 16(2): 207-231; 1996), vinca alkaloids, including vinblastine and vincristine (Ding et al., J. Exp. Med. 171(3): 715-727, 1990; Dirk et al., Neurochem. Res. 15(11): 1135-1139, 1990; Hamel, Med. Res. Rev. 16(2): 207-231, 1996; Illinger et al., Biol. Cell 73(2-3): 131-138, 1991; Wiemer et al., J. Cell. Biol. 136(1): 71-80, 1997), maytansinoids and ansamitocins (Hamel, Med. Res. Rev. 16(2): 207-231, 1996), rhizoxin (Hamel, Med. Res. Rev. 16(2): 207-231, 1996), phomopsin A (Hamel, Med. Res. Rev. 16(2): 207-231, 1996), ustiloxins (Hamel, Med. Res. Rev. 16(2): 207-231, 1996), dolastatin 10 (Hamel, Med Res. Rev. 16(2): 207-231, 1996), dolastatin 15 (Hamel, Med. Res. Rev. 16(2): 207-231, 1996), halichondrins and halistatins (Hamel, Med. Res. Rev. 16(2): 207-231, 1996), spongistatins (Hamel, Med. Res. Rev. 16(2): 207-231, 1996), cryptophycins (Hamel, Med. Res. Rev. 16(2): 207-231, 1996), rhazinilam (Hamel, Med. Res. Rev. 16(2): 207-231, 1996), betaine (Hashimoto et al., Zool. Sci. 1: 195-204, 1984), taurine (Hashimoto et al., Zool. Sci. 1: 195-204, 1984), isethionate (Hashimoto et al., Zool. Sci. 1: 195-204, 1984), HO-221 (Ando et al., Cancer Chemother. Pharmacol. 37: 63-69, 1995), adociasulfate-2 (Sakowicz et al., Science 280: 292-295, 1998), estramustine (Panda et al., Proc. Natl. Acad. Sci. USA 94:10560-10564, 1997), monoclonal anti-idiotypic antibodies (Leu et al., Proc. Natl. Acad. Sci. USA 91(22): 10690-10694, 1994), microtubule assembly promoting protein (taxol-like protein, TALP) (Hwang et al., Biochem. Biophys. Res. Commun. 208(3): 1174-1180, 1995), cell swelling induced by hypotonic (190 mosmol/L) conditions, insulin (100 nmol/L) or glutamine (10 mmol/L) (Haussinger et al., Biochem. Cell. Biol. 72(1-2): 12-19, 1994), dynein binding (Ohba et al., Biochim. Biophys. Acta 1158(3): 323-332, 1993), gibberelin (Mita and Shibaoka, Protoplasma 119(½): 100-109, 1984), XCHO1 kinesin-like protein) (Yonetani et al., Mol. Biol. Cell 7(suppl): 211A, 1996), lysophosphatidic acid (Cook et al., Mol. Biol. Cell 6(suppl): 260A, 1995), lithium ion (Bhattacharyya and Wolff, Biochem. Biophys. Res. Commun. 73(2): 383-390, 1976), plant cell wall components (e.g., poly-L-lysine and extensin) (Akashi et al., Planta 182(3): 363-369, 1990), glycerol buffers (Schilstra et al., Biochem. J. 277(Pt. 3): 839-847, 1991; Farrell and Keates, Biochem. Cell. Biol. 68(11): 1256-1261, 1990; Lopez et al., J. Cell. Biochem. 43(3): 281-291, 1990), Triton X-100 microtubule stabilizing buffer (Brown et al., J. Cell Sci. 104(Pt. 2): 339-352, 1993; Safiejko-Mroczka and Bell, J. Histochem. Cytochem. 44(6): 641-656, 1996), microtubule associated proteins (e.g., MAP2, MAP4, tau, big tau, erisconsin, elongation factor-1-alpha EF-1.alpha.) and E-MAP-115) (Burgess et al., Cell Motil. Cytoskeleton 20(4): 289-300, 1991; Saoudi et al., J. Cell. Sci. 108(Pt. 1): 357-367, 1995; Bulinski and Bossier, J. Cell. Sci. 107(Pt. 10): 2839-2849, 1994; Ookata et al., J. Cell Biol. 128(5): 849-862, 1995; Boyne et al., J. Comp. Neurol. 358(2): 279-293, 1995; Ferreira and Caceres, J. Neurosci. 11 (2): 392400, 1991; Thurston et al., Chromosoma 105(1): 20-30, 1996; Wang et al., Brain Res. Mol. Brain Res. 38(2): 200-208, 1996; Moore and Cyr, Mol. Biol. Cell 7(suppl): 221-A, 1996; Masson and Kreis, J. Cell Biol. 123(2), 357-371, 1993), cellular entities (e.g. histone H1, myelin basic protein and kinetochores) (Saoudi et al., J. Cell. Sci. 108(Pt. 1): 357-367, 1995; Simerly et al., J. Cell Biol. 111(4): 1491-1504, 1990), endogenous microtubular structures (e.g., axonemal structures, plugs and GTP caps) (Dye et al., Cell Motil. Cytoskeleton 21(3): 171-186, 1992; Azhar and Murphy, Cell Motil. Cytoskeleton 15(3): 156-161, 1990; Walker et al., J. Cell Biol. 114(1): 73-81, 1991; Drechsel and Kirschner, Curr. Biol. 4(12): 1053-1061, 1994), stable tubule only polypeptide (e.g., STOP145 and STOP220) (Pirollet et al., Biochim. Biophys. Acta 1160(1): 113-119, 1992; Pirollet et al., Biochemistry 31(37): 8849-8855, 1992; Bosc et al., Proc. Natl. Acad. Sci. USA 93(5): 2125-2130, 1996; Margolis et al., EMBO J. 9(12): 4095-4102, 1990) and tension from mitotic forces (Nicklas and Ward, J. Cell Biol. 126(5): 1241-1253, 1994), as well as any analogues and derivatives of any of the above. Such compounds can act by either depolymerizing microtubules (e.g., colchicine and vinblastine), or by stabilizing microtubule formation (e.g., paclitaxel).”

[0293] U.S. Pat. No. 6,689,803 also discloses (at columns 16 and 17 that, “Within one preferred embodiment of the invention, the anti-mitotic compound is paclitaxel, a compound which disrupts microtubule formation by binding to tubulin to form abnormal mitotic spindles. Briefly, paclitaxel is a highly derivatized diterpenoid (Wani et al., J. Am. Chem. Soc. 93:2325, 1971) which has been obtained from the harvested and dried bark of Taxus brevifolia (Pacific Yew) and Taxomyces Andreanae and Endophytic Fungus of the Pacific Yew (Stierle et al., Science 60:214-216,-1993). “Paclitaxel” (which should be understood herein to include prodrugs, analogues and derivatives such as, for example, TAXOL®, TAXOTERE®), Docetaxel, 10-desacetyl analogues of paclitaxel and 3′N-desbenzoyl-3′N-t-butoxy carbonyl analogues of paclitaxel) may be readily prepared utilizing techniques known to those skilled in the art (see e.g., Schiff et al., Nature 277:665-667, 1979; Long and Fairchild, Cancer Research 54:4355-4361, 1994; Ringel and Horwitz, J. Natl. Cancer Inst. 83(4):288-291, 1991; Pazdur et al., Cancer Treat. Rev. 19(4):351-386, 1993; WO9407882; WO9407881; WO9407880; WO9407876; WO9323555; WO9310076; WO94/00156; WO9324476; EP590267; WO9420089; U.S. Pat. Nos. 5,294,637; 5,283,253; 5,279,949; 5,274,137; 5,202,448; 5,200,534; 5,229,529; 5,254,580; 5,412,092; 5,395,850; 5,380,751; 5,350,866; 4,857,653; 5,272,171; 5,411,984; 5,248,796; 5,248,796; 5,422,364; 5,300,638; 5,294,637; 5,362,831; 5,440,056; 4,814,470; 5,278,324; 5,352,805; 5,411,984; 5,059,699; 4,942,184; Tetrahedron Letters 35(52):9709-9712, 1994; J. Med. Chem. 35:4230-4237, 1992; J. Med. Chem. 34:992-998, 1991; J. Natural Prod. 57(10):1404-1410, 1994; J. Natural Prod. 57(11):1580-1583, 1994; J. Am. Chem. Soc. 110:6558-6560, 1988), or obtained from a variety of commercial sources, including for example, Sigma Chemical Co., St. Louis, Mo. (T7402—from Taxus brevifolia).”

[0294] As is also disclosed in U.S. Pat. No. 6,689,893, “Representative examples of such paclitaxel derivatives or analogues include 7-deoxy-docetaxol, 7,8-cyclopropataxanes, N-substituted 2-azetidones, 6,7-epoxy paclitaxels, 6,7-modified paclitaxels, 10-desacetoxytaxol, 10-deacetyltaxol (from 10-deacetylbaccatin III), phosphonooxy and carbonate derivatives of taxol, taxol 2′,7-di(sodium 1,2-benzenedicarboxylate, 10-desacetoxy-11,12-dihydrotaxol-10,12(18)-diene derivatives, 10-desacetoxytaxol, Protaxol(2′- and/or 7-O-ester derivatives), (2′- and/or 7-O-carbonate derivatives), asymmetric synthesis of taxol side chain, fluoro taxols, 9-deoxotaxane, (13-acetyl-9-deoxobaccatine III, 9-deoxotaxol, 7-deoxy-9-deoxotaxol, 10-desacetoxy-7-deoxy-9-deoxotaxol, Derivatives containing hydrogen or acetyl group and a hydroxy and tert-butoxycarbonylamino, sulfonated 2′-acryloyltaxol and sulfonated 2′-O-acyl acid taxol derivatives, succinyltaxol, 2′-.gamma.-aminobutyryltaxol formate, 2′-acetyl taxol, 7-acetyl taxol, 7-glycine carbamate taxol, 2′-OH-7-PEG(5000)carbamate taxol, 2′-benzoyl and 2′,7-dibenzoyl taxol derivatives, other prodrugs (2′-acetyl taxol; 2′,7-diacetyltaxol; 2′succinyltaxol; 2′-(beta-alanyl)-taxol); 2′gamma-aminobutyryltaxol formate; ethylene glycol derivatives of 2′-succinyltaxol; 2′-glutaryltaxol; 2′-(N,N-dimethylglycyl)taxol; 2′-(2-(N,N-dimethylamino)propionyl)taxol; 2′orthocarboxybenzoyl taxol; 2′aliphatic carboxylic acid derivatives of taxol, Prodrugs {2′(N,N-diethylaminopropionyl)taxol, 2′(N,N-dimethylglycyl)taxol, 7(N,N-dimethylglycyl)taxol, 2′,7-di-(N,N-dimethylglycyl)taxol, 7(N,N-diethylaminopropionyl)taxol, 2′,7-di(N,N-diethylaminopropionyl)taxol, 2′-(L-glycyl)taxol, 7-(L-glycyl)taxol, 2′,7-di(L-glycyl)taxol, 2′-(L-alanyl)taxol, 7-(L-alanyl)taxol, 2′,7-di(L-alanyl)taxol, 2′-(L-leucyl)taxol, 7-(L-leucyl)taxol, 2′,7-di(L-leucyl)taxol, 2′-(L-isoleucyl)taxol, 7-(L-isoleucyl)taxol, 2′,7-di(L-isoleucyl)taxol, 2′-(L-valyl)taxol, 7-(L-valyl)taxol, 2′7-di(L-valyl)taxol, 2′-(L-phenylalanyl)taxol, 7-(L-phenylalanyl)taxol, 2′,7-di(L-phenylalanyl)taxol, 2′-(L-prolyl)taxol, 7-(L-prolyl)taxol, 2′,7-di(L-prolyl)taxol, 2′-(L-lysyl)taxol, 7-(L-lysyl)taxol, 2′,7-di(L-lysyl)taxol, 2′-(L-glutamyl)taxol, 7-(L-glutamyl)taxol, 2′,7-di(L-glutamyl)taxol, 2′-(L-arginyl)taxol, 7-(L-arginyl)taxol, 2′,7-di(L-arginyl)taxol}, Taxol analogs with modified phenylisoserine side chains, taxotere, (N-debenzoyl-N-tert-(butoxycaronyl)-10-deacetyltaxol, and taxanes (e.g., baccatin III, cephalomannine, 10-deacetylbaccatin III, brevifoliol, yunantaxusin and taxusin).”

[0295] By way of yet further illustration, one may use one or more of the anti-mitotic agents disclosed in U.S. Pat. No. 6,673,937 (syntheses and methods of use of new antimitotic agents), U.S. Pat. No. 6,624,317 (taxoid conjugates as antimitotoic and antitumor agents), U.S. Pat. No. 6,593,334 (camptothecin-taxoid conjugates as antimitotic and antitumor agents), U.S. Pat. No. 6,593,321 (2-alkoxyestradiiol analogs with antiproliferative and antimitotic activity), U.S. Pat. No. 6,569,870 (fluorinated quinolones as antimitotic and antitumor agent), U.S. Pat. No. 6,528,489 (mycotoxin derivatives as antimitotic agents), U.S. Pat. No. 6,392,055 (synthesis and biological evaluation of analogs of the antimitotic marine natural product curacin A), U.S. Pat. No. 6,127,377 (vinka alkaloid antimitotic halogenated derivatives), U.S. Pat. No. 5,695,950 (method of screening for antimitotic compounds using the cdc25 tyrosine phosphatase), U.S. Pat. No. 5,620,985 (antimitotic binary alkaloid derivatives from catharanthus roseus), U.S. Pat. No. 5,294,538 (method of screening for antimitotic compounds using the CDC tyrosine phosphatase), and the like. The entire disclosure of each of these United States patents is hereby incorporated by reference into this specification.

[0296] As will be apparent, one or more of the aforementioned anti-mitotic and/or anti-microtubule agents may be modified to make them magnetic in accordance with this invention.

Synergistic Combinations of Magnetic Anti-Mitotic Agents

[0297] In one embodiment of this invention, discussed elsewhere in this specification, a synergistic combination of the magnetic anti-mititoic compound of this invention and paclitaxel is described. In the embodiment of the invention described in this section of the specification, a synergitic combination of two or more anti-mititoic compounds is described.

[0298] In one embodiment, the first anti-mitotic compound is preferably a magentic taxane such as, e.g., magentic paclitaxel and/ormagnetic docetaxel. In this embodiment, the second anti-mitotic compound may be magnetic discdermolide, and/or magnetic epothilone A, and/or magentic epothilone B, and/or mixtures thereof. Other suitable combinations of magnetic anti-mitotic agents will be apparent.

Properties of the Preferred Anti-Mitotic Compounds

[0299] In one preferred embodiment, the compound of this invention has a mitotic index factor of at least about 10 percent and, more preferably, at least about 20 percent. In one aspect of this embodiment, the mitotic index factor is at least about 30 percent. In another embodiment, the mitotic index factor is at least about 50 percent.

[0300] In another embodiment of the invention, the compound of this invention has a mitotic index factor of less than about 5 percent.

[0301] As is known to those skilled in the art, the mitotic index is a measure of the extent of mitosis. Reference may be had, e.g., to U.S. Pat. No. 5,262,409 (binary tumor therapy), U.S. Pat. No. 5,443,962 (methods of indentifying inhibitors of cdc25 phosphatase), U.S. Pat. No. 5,744,300 (methods and reagents for the indentificatioin and regulation of senescence-related genes), U.S. Pat. Nos. 6,613,318, 6,251,585 (assay and reagents for indentifying anti-proliferative agents), U.S. Pat. No. 6,252,058 (sequences for targeting metastatic cells), U.S. Pat. No. 6,387,642 (method for indentifying a reagent that modulates Myt1 activity), U.S. Pat. No. 6,413,735 (method of screening for a modulator of angiogenesis), U.S. Pat. No. 6,531,479 (anti-cancer compounds), U.S. Pat. No. 6,599,694 (method of characterizing potential therapeutics by determining cell-cell interactions), U.S. Pat. No. 6,620,403 (in vivo chemosensitivity screen for human tumors), U.S. Pat. No. 6,699,854 (anti-cancer compounds), U.S. Pat. No. 6,743,576 (database system for predictive cellular bioinformatics), and the like. The entire disclosure of each of these United States patents is hereby incorporated by reference into this specification.

[0302] Reference may also be had, e.g., to U.S. Pat. No. 5,262,409, which discloses that: “Determination of mitotic index: For testing mitotic blockage with nocodazole and taxol, cells were grown a minimum of 16 hours on polylysinecoated glass coverslips before drug treatment. Cells were fixed at intervals, stained with antibodies to detect lamin B, and counterstained with propidium iodide to assay chromosome condensation. To test cell cycle blocks in interphase, cells were synchronized in mitosis by addition of nocodazole (Sigma Chemical Co.) to a final concentration of 0.05 μg/ml from a 1 mg/ml stock in dimethylsulfoxide. After 12 hours arrest, the mitotic subpopulation was isolated by shakeoff from the culture plate. After applying cell cycle blocking drugs and/or 2-AP, cells were fixed at intervals, prepared for indirect immunofluorescence with anti-tubulin antibodies, and counterstained with propidium iodide. All data timepoints represent averages of three counts of greater than 150 cells each. Standard deviation was never more than 1.5% on the ordinate scale.”

[0303] Reference may be had, e.g., to U.S. Pat. No. 6,413,735 which discloses that: “The mitotic index is determined according to procedures standard in the art. Keram et al., Cancer Genet. Cytogenet. 55:235 (1991). Harvested cells are fixed in methanol:acetic acid (3:1, v:v), counted, and resuspended at 106 cells/ml in fixative. Ten microliters of this suspension is placed on a slide, dried, and treated with Giemsa stain. The cells in metaphase are counted under a light microscope, and the mitotic index is calculated by dividing the number of metaphase cells by the total number of cells on the slide. Statistical analysis of comparisons of mitotic indices is performed using the 2-sided paired t-test.”

[0304] By means of yet further illustration, one may measure the mitotic index by means of the procedures described in, e.g., articles by Keila Torres et al. (“Mechanisms of Taxol-Induced Cell Death are Concentration Dependent,” Cancer Research 58, 3620-3626, Aug. 15, 1998), and Jie-Gung Chen et al. (“Differential Mitosis Responses to Microtubule-stabilizing and destablilizng Drugs,” Cancer Research 62,1935-1938, Apr. 1, 2002).

[0305] The mitotic index is preferably measured by using the well-known HeLa cell lines. As is known to those skilled in the art, HeLa cells are cells that have been derived from a human carcinoma of the cervix from a patient named Henrietta Lack; the cells have been maintained in tissued culture since 1953.

[0306] Hela cells are described, e.g., in U.S. Pat. No. 5,811,282 (cell lines useful for detection of human immunodeficiency virus), U.S. Pat. No. 5,376,525 (method for the detectioin of mycoplasma), U.S. Pat. Nos. 6,143,512, 6,326,196, 6,365,394 (cell lines and constructs useful in production of E-1 deleted adenoviruses), U.S. Pat. No. 6,440,658 (assay method for determining effect on aenovirus infection of Hela cells), U.S. Pat. No. 6,461,809 (method of improving inflectivity of cells for viruses), U.S. Pat. Nos. 6,596,535, 6,605,426, 6,610,493 (screening compounds for the ability to alter the production of amyloid-beta-peptide), U.S. Pat. No. 6,699,851 (cytotoxic compounds and their use), and the like; the entire disclosure of each of these United States patents is hereby incorporated by reference into this specification. By way of illustration, U.S. Pat. No. 6,440,658 discloses that, for the experiments described in such patent, “The HeLa cell line was obtained from the American Type Culture Collection, Manassas Va.”

[0307] In one preferred embodiment, the mitotic index of a “control cell line” (i.e., one that omits that drug to be tested) and of a cell line that includes 50 nanomoles of such drug per liter of the cell line are determined and compared. The “mitotic index factor” is equal to (Mt−Mc/Mc)×100, wherein Mc is the mitotic index of the “control cell line,” and Mt is the mitotic index of the cell line that includes the drug to be tested.

[0308] The compound of this invention preferably has a molecular weight of at least about 150 grams per mole. In one embodiment, the molecular weight of such compound is at least 300 grams per mole. In another embodiment, the molecular weight of such compound is 400 grams per mole. In yet another embodiment, the molecular weight of such compound is at least about 550 grams per mole. In yet another embodiment, the molecular weight of such compound is at least about 1,000 grams per mole. In yet another embodiment, the molecular weight of such compound is at least 1,200 grams per mole.

[0309] The compound of this invention preferably has a positive magnetic susceptibility of at least 1,000×10⁻⁶ centimeter-gram-seconds (cgs). As is known to those skilled in the art, magnetic susceptibility is the ratio of the magnetization of a material to the magnetic filed strength. Reference may be had, e.g., to U.S. Pat. No. 3,614,618 (magnetic susceptibility tester), U.S. Pat. No. 3,644,823 (nulling coil apparatus for magnetic susceptibility logging), U.S. Pat. No. 3,657,636 (thermally stable coil assembly for magnetic susceptibility logging), U.S. Pat. No. 3,665,297 (apparatus for determining magnetic susceptibility in a controlled chemical and thermal environment), U.S. Pat. No. 3,758,847 (method and system with voltage cancellation for measuring the magnetic susceptibility of a subsurface earth formation), U.S. Pat. No. 3,758,848 (magnetic susceptibility well logging system), U.S. Pat. No. 3,879,658 (apparatus for measuring magnetic susceptibility), U.S. Pat. No. 3,890,563 (magnetic susceptibility logging apparatus for distinguishing ferromagnetic materials), U.S. Pat. No. 3,980,076 (method for measuring externally of the human body magnetic susceptibility changes), U.S. Pat. No. 4,079,730 (apparatus for measuring externally of the human body magnetic susceptibility changes), U.S. Pat. No. 4,277,750 (induction probe for the measurement of magnetic susceptibility), U.S. Pat. No. 4,359,399 (taggands with induced magnetic susceptibility), U.S. Pat. No. 4,507,613 (method for identifying non-magnetic minerals in earth formations utilizing magnetic susceptibility measurements), U.S. Pat. No. 4,662,359 (use of magnetic susceptibility probes in the treatment of cancer), U.S. Pat. No. 4,701,712 (thermoregulated magnetic susceptibility sensor assembly), U.S. Pat. No. 5,233,992 (MRI method for high liver iron measurement using magnetic susceptibility induced field distortions), U.S. Pat. No. 6,208,884 (noninvasive room temperature instrument to measure magnetic susceptibility variations in body tissue), U.S. Pat. No. 6,321,105 (contrast agents with high magnetic susceptibility), U.S. Pat. No. 6,477,398 (resonant magnetic susceptibility imaging), and the like. The entire disclosure of each of these United States patent applications is hereby incorporated by reference into this specification.

[0310] In one embodiment, the compound of this invention has a positive magnetic susceptibility of at least 5,000×10⁻⁶ cgs. In another embodiment, such compound has a positive magnetic susceptibility of at least 10,000×10⁻⁶ cgs.

[0311] The compound of this invention is preferably comprised of at least 7 carbon atoms and, more preferably, at least about 10 carbon atoms. In another embodiment, such compound is comprised of at least 13 carbon atoms and at least one aromatic ring; in one aspect of this embodiment, the compound has at least two aromatic rings. In another embodiment, such compound is comprised of at least 17 carbon atoms.

[0312] In one embodiment, the compound of this invention is comprised of at least one oxetane ring. As is disclosed, e.g., on page 863 of N. Iving Sax's “Hawley's Condensed Chemical Dictionary,” Eleventh Edition (Van Nostrand Reinhold Company, New York, N.Y., 1987), the oxetane group, also known as “trimethylene oxide), is identified by chemical abstract number CAS: 503-30-0. The oxetane group present in the preferred compound preferably is unsubstituted. In one embodiment, however, one ore more of the ring carbon atoms (either carbon number one, or carbon number two, or carbon number 3), has one or more of its hydrogen atoms substituted by a halogen group (such as chlorine), a lower alkyl group of from 1 to 4 carbon atoms, a lower haloalkyl group of from 1 to 4 carbon atoms, a cyanide group (CN), a hydroxyl group, a carboxyl group, an amino group (wich can be primary, secondary, or teriarary and may also contain from 0 to 6 carbon atoms), a substituted hydroxyl group (such as, e.g., an ether group containing from 1 to 6 carbon atoms), and the like. In one aspect of this embodiment, the substituted oxetane group is 3,3-bis (chlormethyl) oxetane.

[0313] In one embodiment, the compound of this invention is comprised of from about 1 to 10 groups of the formula —OB, in which B is selected from the group consisting of hydrogen, alkyl of from about 1 to about 5 carbon atoms, and a moiety of the formula R—(C=0)—O—, wherein R is selected from the group consisting of hydrogen and alkyl of from about 1 to about 6 cabon atoms, and the carbon is bonded to the R moiety, to the double-bonded oxygen, and to the single bonded oxygen, thereby forming what is commonly known as an acetyl group. This acetyl group preferably is linked to a ring structure that is unsaturated and preferably contains from about 6 to about 10 carbon atoms.

[0314] In one embodiment, the compound is comprised of two unsaturated ring structures linked by an amide structure, which typically has an acyl group, —CONR₁—, wherein R₁ is selected from the group consisting of hydrogen lower alkyl of from 1 to about 6 carbon atoms. In one preferred embodiment, the N group is bonded to both to the R₁ group and also to radical that contains at least about 20 carbon atoms and at least about 10 oxygen atoms.

[0315] In one embodiment, the compound of this invention contains at least one saturated ring comprising from about 6 to about 10 carbon atoms. By way of illustration, the saturated ring structures may be one or more cyclohexane rings, cyclopheptane rings, cyclooctane rings, cylclononane rings, and/or cylcodecane rings. In one preferred aspect of this embodiment, at least one saturated ring in the compound is bonded to at least one quinine group. Referring to page 990 of the “Hawley's Condensed Chemical Dictionary” described elsewhere in this specification, quinine is 1,4-benzoquinone and is identified as “CAS: 106-51-4.”

[0316] In one embodiment, the compound of this invention may comprise a ring structure with one double bond or two double bonds (as opposed to the three double bonds in the aromatic structures). These ring structures may be a partially unsaturated material selected from the group consisting of partially unsaturated cyclohexane, partially unsaturated cyclopheptane, partially unsaturated cyclooctane, partially unstaruated cyclononane, partially unsaturated cyclodecane, and mixtures thereof.

[0317] The compound of this invention is also preferably comprised of at least one inorganic atom with a positive magnetic susceptibility of at least 200×10⁻⁶ cgs. Thus, and referring to the “CRC Handbook of Chemistry and Physics,” 63^{rd} Edition (CRC Press, Inc., Boca Raton, Fla., 1982-83), the magnetic susceptibility of elements are described at pages E-118 to E-123. Suitable inorganic (i.e., non-carbon containing) elements with a positive magnetic susceptibility greater than about 200×10⁻⁶ cgs include, e.g., cerium (+5,160×10⁻⁶ cgs), cobalt (+11,000×10⁻⁶ cgs), dysprosium (+89,600×10⁻⁶ cgs), europium (+34,000×10⁻⁶ cgs), gadolinium (+755,000×10⁻⁶ cgs), iron (+13,600×10⁻⁶ cgs), manganese (+529×10⁻⁶ cgs), palladium (+567.4×10⁻⁶ cgs), plutonium (+610×10⁻⁶ cgs), praseodymium (+5010×10⁻⁶ cgs), samarium (+2230×10⁻⁶ cgs), technetium (+250×10⁻⁶ cgs), thulium (+51,444×10⁻⁶ cgs), and the like. In one embodiment, the positive magnetic susceptibility of such element is preferably greater than about +500×10⁻⁶ cgs and, even more preferably, greater than about +1,000×10⁻⁶ cgs.

[0318] In one preferred compound, the inorganic atom is radioactive. As is known to those skilled in the art, radioactivity is a phenomenon characterized by spontaneous disintegration of atomic nuclei with emission of corpuscular or electromagnetic radiation.

[0319] In another preferred embodiment, one or more inorganic or organic atoms that do not have the specified degree of magnetic suscpeptibility are radioactive. Thus, e.g., the radioactive atom may be, e.g, radioactive carbon, radioactive hydrogen (tritium), radioactive phosphorus, radioactive sulfur, radioactive potassium, or any other of the atoms that exist is radioactive isotope form.

[0320] One preferred class of atoms is the class of radioactive nuclides. As is known to those skilled in the art, radioactive nuclides are atoms disintegrate by emission of corpuscular or electromagnetic radiatons. The rays most commonly emitted are alpha or beta gamma rays. See, e.g., page F-109 of the aforementioned “CRC Handbook of Chemistry and Physics.”

[0321] Radioactive nuclides are well known and are described, e.g., in U.S. Pat. No. 4,355,179 (radioactive nuclide labeled propiophenone compounds), U.S. Pat. No. 4,625,118 (device for the elution and metering of a radioactive nuclide), U.S. Pat. No. 5,672,876 (method and apparatus for measuring distribution of radioactive nuclide in a subject), and U.S. Pat. No. 6,607,710 (bisphosphonic acid derivative and compound thereof labeled with radioactive nuclide.). The entire disclosure of each of these United States patents is hereby incorporated by reference into this specification.

[0322] Referring again to the aforementioned “CRC Handbook of Chemistry and Physics,” and to pages and in particular to pages B340-B378 thereof, it will be seen that the inorganic atom may be, e.g., cobalt 53, cobalt 54, cobalt 55, cobalt 56, cobalt 57, cobalt 58, cobalt 59, cobalt 60, cobalt 61, cobalt 62, cobalt 63, gadolinium 146, iron 49, iron 51, iron 52, iron 53, iron 54, iron 57, iron 58, iron 59, iron 60, iron 61, iron 62, manganese 50, praseodymium 135, samarium 156, and the like.

[0323] The compound of this invention preferably has a magnetic moment of at least about 0.5 Bohr magnetrons per molecule and, more preferably, at least about 1.0 Bohr magnetrons per molecule. In one embodiment, the compound has a magnetic moment of at least about 2 Bohr magnetrons per molecule.

[0324] As is known to those skilled in the art, a Bohr magnetron is the amount he/4(pi)mc, wherein he is Plank's constant, e and m are the charge and mass of the electron, c is the speed of light, and pi is equal to about 3.14567. Reference may be had, e.g., to U.S. Pat. Nos. 4,687,331, 4,832,877, 4,849,107, 5,040,373 (“(One Bohr magnetron is equal to 9.273×10−24 Joules/Tesla”), U.S. Pat. Nos.5,169,944, 5,323,227 (“μo is a constant known as the Bohr magnetron at 9.274×10−21 erg/Gauss”), U.S. Pat. Nos. 5,352,979; 6,383,597; 6,725,668; 6,739,137 (“One Bohr magnetron μB is equal to 9.273×10−24 Joules/Tesla”), and the like. The entire disclosure of each of these United States patents is hereby incorporated by reference into this specification.

[0325] In one preferred embodiment, the magnetic compound of this invention is water soluble. As is known to those skilled in the art, solubility of one liquid or solid in another is the mass of the substance cotnained in a solution which is in equilibrium with an excess of the substance. Under such conditions, the solution is said to be saturated. Reference may be had, e.g., to page F-95 of the CRC “Handbook of Chemistry and Physics,” 53^{rd} Edition (The Chemical Rubber Company, CRC Press Division, 18901 Cranwood Parkway, Cleveland, Ohio, 44128,1972-1973).

[0326] As used in this specification, the term “water soluble” refers to a solubility of at least 10 micrograms per milliliter and, more preferably, at least 100 micrograms per milliliter; by way of comparison, the solubility of paclitaxel in water is only about 0.4 micrograms per milliliter. One may determine water solubulity by conventional means. Thus, e.g., one may mix 0.5 milliters of water with the compound to be tested under ambient conditions, stir for 18 hours under ambient conditions, filter the slurry thus produced to remove the non-solubulized portion of the fitrand, and calculae how much of the filtrand was solubilized. From this, one can determine the number of micrograms that went into solution.

[0327] In one embodiment, the magnetic compound of this invention has a water solubility of at least 500 micrograms per milliliter, and more preferably at least 1,000 micrograms per milliliter. In yet another embodiment, the magnetic compound of this invention has a water solubility of at least 2500 micrograms per milliliter. In yet another embodiment, the magnetic compound of this invention has a water solubility of at least 5,000 micrograms per milliliter. In yet another embodiment, the magnetic compound of this invention has a water solubility of at least 10,000 micrograms per milliliter.

[0328] In another embodiment, the magnetic compound of this invention has a water solubility of less than about 10 micrograms per milliliter and, preferably, less than about 1.0 micrograms per milliliter.

[0329] Without wishing to be bound to any particular theory, applicants believe that the presence of a hydrophilic group in the compound of their invention helps render such compound water-soluble. Thus, e.g., it is believed that the siderophore group that is present in their preferred compounds aids in creating such water-solubility. As is known to those skilled in the art, a siderophe is one of a number of low molecular weight, iron-containing, or iron binding organic compounds or groups. Siderophores have a storng affinity for Fe³⁺ (which they chelate) and function in the solubilization and transport of iron. Siderophores are classified as belonging to either the phenol-catechol type (such as enterobactin and agrobactin), or the hydroxyamic acid type (such as ferrichome and mycobactin). Reference may be had, e.g., to page 442 of J. Stenesh's “Dictionary of Biochemistry and Molecular Biology,” Second Edition (John Wiley & Sons, New York, N.Y., 1989).

[0330] In one preferred embodiment, the compound of this invention is comprised of one or more siderophore groups bound to a magnetic moiety (such as, e.g., an atom selected from the group consisting of iron, cobalt, nickel, and mixtures thereof).

[0331] As will be apparent, the inclusion of other hydrophilic groups into otherwise water-insoluble compounds is contemplated. Thus, by way of illustration and not limitation, and in place of or in addition to such siderophore group, one use hydrophilic groups such as the siderophore group(s) described hereinabove, hydroxyl groups, carboxyl groups, amino groups, organometallic ionic structures, phosphate groups, and the like. In one preferred aspect of this embodiment, the hydrophilic group utilized should preferably be biologically inert.

[0332] In one embodiment, the magnetic compound of this invention has an association rate with microtubules of at least 3,500,000/mole/second. The association rate may be determined in accordance with the procedure described in an article by J. F. Diaz et al., “Fast Kinetics of Taxol Binding to Microtubules,” Journal of Biological Chemistry, 278(10) 8407-8455. Reference also may be had, e.g., to a paper by J. R. Strobe et al. appearing in the Journal of Biological Chemistry, 275: 26265-26276 (2000). As is disclosed, e.g., in the Diaz et al. paper, “The kinetics of binding and dissociation of Flutax-1 and Flutax-2 were measured by the change of fluorescence intensity using an SS-51 stopped flow device (High-Tech Scientific, UK) equipped with a fluorescence detetion system, using an excitation wavelenght of 492 and a 530-nmcut-off filter in the emission pathway. The fitting of the kinetic curves was done with a non-linear least squares sfitting program based upon the Marquardt algorithm . . . where pseudo-firt order conditions were used . . . . ”

[0333] In another embodiment of the invention, the magnetic compound of this invention has a dissociation rate with microubules, as measured in accordance with the procedure desribed in such Diaz et al. paper, of less than about 0.08/second, when measured at a temperature of 37 degrees Celsius and under atmospheric conditions. Thus, in this embodiment, the magnetic compound of this invention binds more durably to microtubules than does paclitaxel, which has a dissociation rate of at least 0.91/second.

[0334] In one embodiment, the dissociation rate of the magnetic compound of this invention is less than 0.7/second and, more preferably, less than 0.6/second.

[0335] In one embodiment of this invention, the anti-mitotic compound of the invention has the specified degree of water-solubility and of anti-mitotic activity but does not necessarily possess one or more of the magnetic properties described hereinabove.

Other Magnetic Compounds

[0336] In another embodiment of this invention, other compounds which are not necessarily anti-mitotic are made magnetic by a process comparable to the process described in this specification for making taxanes magnetic.

[0337] In this embodiment, it is preferred to make “magnetic derivatives” of drugs and therapeutic agents. These derivative compounds each preferably have a molecular weight of at least 150 grams per mole, a positive magnetic susceptibility of at least 1,000×10⁻⁶ cgs, and a magnetic moment of at least 0.5 bohr magnetrons, wherein said compound is comprised of at least 7 carbon atoms and at least one inorganic atom with a positive magnetic susceptibility of at least 200×10⁻⁶ cgs.

[0338] Some of the preferred “precursors” used to make these “derivative compounds” are described in the remainder of this section of the specification.

[0339] The precursor materials may be either proteinaceous or non-proteinaceous drugs, as they terms are defined in U.S. Pat. No. 5,194,581, the entire disclosure of which is hereby incorporated by reference into this specification. U.S. Pat. No. 5,194,581 discloses “The drugs with which can be incorporated in the compositions of the invention include non-proteinaceous as well as proteinaceous drugs. The term “non-proteinaceous drugs” encompasses compounds which are classically referred to as drugs such as, for example, mitomycin C, daunorubicin, vinblastine, AZT, and hormones. Similar substances are within the skill of the art. The proteinaceous drugs which can be incorporated in the compositions of the invention include immunomodulators and other biological response modifiers. The term “biological response modifiers” is meant to encompass substances which are involved in modifying the immune response in such manner as to enhance the particular desired therapeutic effect, for example, the destruction of the tumor cells. Examples of immune response modifiers include such compounds as lymphokines. Examples of lymphokines include tumor necrosis factor, the interleukins, lymphotoxin, macrophage activating factor, migration inhibition factor, colony stimulating factor and the interferons. Interferons which can be incorporated into the compositions of the invention include alpha-interferon, beta-interferon, and gamma-interferon and their subtypes. In addition, peptide or polysaccharide fragments derived from these proteinaceous drugs, or independently, can also be incorporated. Also, encompassed by the term “biological response modifiers” are substances generally referred to as vaccines wherein a foreign substance, usually a pathogenic organism or some fraction thereof, is used to modify the host immune response with respect to the pathogen to which the vaccine relates. Those of skill in the art will know, or can readily ascertain, other substances which can act as proteinaceous drugs.”

[0340] The precursor may be a lectin, as is disclosed in U.S. Pat. No. 5,176,907, the entire disclosure of which is hereby incorporated by reference into this specification. This United States patent discloses “Lectins are proteins, usually isolated from plant material, which bind to specific sugar moieties. Many lectins are also able to agglutinate cells and stimulate lymphocytes. Other therapeutic agents which can be used therapeutically with the biodegradable compositions of the invention are known, or can be easily ascertained, by those of ordinary skill in the art.”

[0341] The precursor material may be an amorphous water-soluble pharmaceutical agent, as is disclosed in U.S. Pat. No. 6,117,455, the entire disclosure of which is hereby incorporated by reference into this specification. As is disclosed in the abstract of this patent, there is provided “A sustained-release microcapsule contains an amorphous water-soluble pharmaceutical agent having a particle size of from 1 nm-10 μm and a polymer. The microcapsule is produced by dispersing, in an aqueous phase, a dispersion of from 0.001-90% (w/w) of an amorphous water-soluble pharmaceutical agent in a solution of a polymer having a wt. avg. molecular weight of 2,000-800,000 in an organic solvent to prepare an s/o/w emulsion and subjecting the emulsion to in-water drying.”

[0342] In one embodiment, and referring to U.S. Pat. No. 5,420,105 (the entire disclosure of which is hereby incorporated by reference into this specification), the precursor material is selected from the group consisting of an anti-cancer anthracycline antibiotic, cis-platinum, methotrexate, vinblastine, mitoxanthrone ARA-C, 6-mercaptopurine, 6-mercaptoguanosine, mytomycin C and a steroid.

[0343] By way of further illustration, the precursor material is selected from the group consisting of antithrombogenic agents, antiplatelet agents, prostaglandins, thrombolytic drugs, antiproliferative drugs, antirejection drugs, antimicrobial drugs, growth factors, and anticalcifying agents.

[0344] By way of yet further illustration, the precursor material may, e.g., be any one or more of the therapeutic agents disclosed in column 5 of U.S. Pat. No. 5,464,650. Thus, and referring to such column 5, “The therapeutic substance used in the present invention could be virtually any therapeutic substance which possesses desirable therapeutic characteristics for application to a blood vessel. This can include both solid substances and liquid substances. For example, glucocorticoids (e.g. dexamethasone, betamethasone), heparin, hirudin, tocopherol, angiopeptin, aspirin, ACE inhibitors, growth factors, oligonucleotides, and, more generally, antiplatelet agents, anticoagulant agents, antimitotic agents, antioxidants, antimetabolite agents, and anti-inflammatory agents could be used. Antiplatelet agents can include drugs such as aspirin and dipyridamole. Aspirin is classified as an analgesic, antipyretic, anti-inflammatory and antiplatelet drug. Dypridimole is a drug similar to aspirin in that it has anti-platelet characteristics. Dypridimole is also classified as a coronary vasodilator. Anticoagulant agents can include drugs such as heparin, coumadin, protamine, hirudin and tick anticoagulant protein. Antimitotic agents and antimetabolite agents can include drugs such as methotrexate, azathioprine, vincristine, vinblastine, fluorouracil, adriamycin and mutamycin.”

[0345] The precurors material may be one or more of the drugs disclosed in U.S. Pat. No. 5,599,352, the entire disclosure of which is hereby incorporated by reference into this specification. As is disclosed in this patent, “Examples of drugs that are thought to be useful in the treatment of restenosis are disclosed in published international patent application WO9112779 “Intraluminal Drug Eluting Prosthesis” which is incorporated herein by reference. Therefore, useful drugs for treatment of restenosis and drugs that can be incorporated in the fibrin and used in the present invention can include drugs such as anticoagulant drugs, antiplatelet drugs, antimetabolite drugs, anti-inflammatory drugs and antimitotic drugs. Further, other vasoreactive agents such as nitric oxide releasing agents could also be used . . . . By this method, drugs such as glucocorticoids (e.g. dexamethasone, betamethasone), heparin, hirudin, tocopherol, angiopeptin, aspirin, ACE inhibitors, growth factors, oligonucleotides, and, more generally, antiplatelet agents, anticoagulant agents, antimitotic agents, antioxidants, antimetabolite agents, and anti-inflammatory agents can be applied to a stent . . . . ”

[0346] By way of yet further illustration, and referring to U.S. Pat. No. 5,605,696 (the entire disclosure of which is hereby incororporated by reference into this specification), the precursor may be a “selected therapeutic drug” that may be, e.g., “ . . . anticoagulant antiplatelet or antithrombin agents such as heparin, D-phe-pro-arg-chloromethylketone (synthetic antithrombin), dipyridamole, hirudin, recombinant hirudin, thrombin inhibitor (available from Biogen), or c7E3 (an antiplatelet drug from Centocore); cytostatic or antiproliferative agents such as angiopeptin (a somatostatin analogue from Ibsen), angiotensin converting enzyme inhibitors such as Captopril (available from Squibb), Cilazapril (available from Hoffman-LaRoche), or Lisinopril (available from Merk); calcium channel blockers (such as Nifedipine), colchicine, fibroblast growth factor (FGF) antagonists, fish oil (omega 3-fatty acid), low molecular weight heparin (available from Wyeth, and Glycomed), histamine antagonists, Lovastatin (an inhibitor of HMG-CoA reductase, a cholesterol lowering drug from Merk), methotrexate, monoclonal antibodies (such as to PDGF receptors), nitroprusside, phosphodiesterase inhibitors, prostacyclin and prostacyclin analogues, prostaglandin inhibitor (available from Glaxo), Seramin (a PDGF antagonist), serotonin blockers, steroids, thioprotease inhibitors, and triazolopyrimidine (a PDGF antagonist). Other therapeutic drugs which may be appropriate include alphainterferon and genetically engineered epithelial cells, for example.”

[0347] By way of yet further illustration, and referring to U.S. Pat. No. 5,700,286 (the entire disclosure of which is hereby incorporated by reference into this specification), precursor material may be a therapeutic agent or drug “ . . . including, but not limited to, antiplatelets, antithrombins, cytostatic and antiproliferative agents, for example, to reduce or prevent restenosis in the vessel being treated. The therapeutic agent or drug is preferably selected from the group of therapeutic agents or drugs consisting of sodium heparin, low molecular weight heparin, hirudin, argatroban, forskolin, vapiprost, prostacyclin and prostacyclin analogues, dextran, D-phe-pro-arg-chloromethylketone, dipyridamole, glycoprotein IIb/IIIa platelet membrane receptor antibody, recombinant hirudin, thrombin inhibitor, angiopeptin, angiotensin converting enzyme inhibitors, (such as Captopril, available from Squibb; Cilazapril, available for Hoffman-La Roche; or Lisinopril, available from Merck) calcium channel blockers, colchicine, fibroblast growth factor antagonists, fish oil, omega 3-fatty acid, histamine antagonists, HMG-CoA reductase inhibitor, methotrexate, monoclonal antibodies, nitroprusside, phosphodiesterase inhibitors, prostaglandin inhibitor, seramin, serotonin blockers, steroids, thioprotease inhibitors, triazolopyrimidine and other PDGF antagonists, alpha-interferon and genetically engineered epithelial cells, and combinations thereof.”

[0348] By way of yet further illustration, and referring to U.S. Pat. No. 5,900,433 (the entire disclosure of which is hereby incorporated by reference into this specification), the precursor material may be a congener of an endothelium-derived bioactive composition of matter. This congener is discussed in column 7 of the patent, wherein it is disclosed that “We have discovered that administration of a congener of an endothelium-derived bioactive agent, more particularly a nitrovasodilator, representatively the nitric oxide donor agent sodium nitroprusside, to an extravascular treatment site, at a therapeutically effective dosage rate, is effective for abolishing CFR's while reducing or avoiding systemic effects such as supression of platelet function and bleeding . . . congeners of an endothelium-derived bioactive agent include prostacyclin, prostaglandin E1, and a nitrovasodilator agent. Nitrovasodilater agents include nitric oxide and nitric oxide donor agents, including L-arginine, sodium nitroprusside and nitroglycycerine.”

[0349] By way of yet further illustration, the precursor material may be heparin. As is disclosed in U.S. Pat. No. 6,120,536 (the entire disclosure of which is hereby incorporated by reference into this specification), “While heparin is preferred as the incorporated active material, agents possibly suitable for incorporation include antithrobotics, anticoagulants, antibiotics, antiplatelet agents, thorombolytics, antiproliferatives, steroidal and non-steroidal antinflammatories, agents that inhibit hyperplasia and in particular restenosis, smooth muscle cell inhibitors, growth factors, growth factor inhibitors, cell adhesion inhibitors, cell adhesion promoters and drugs that may enhance the formation of healthy neointimal tissue, including endothelial cell regeneration.”

[0350] By way of yet further illustration, and referring to U.S. Pat. No. 6,624,138 (the entire disclosure of which is hereby incorporated by reference into this specification), the precursor material may be one or more of the drugs described in this patent. Thus, and referring to columns 9 et seq. of such patent, “Straub et al. in U.S. Pat. No. 6,395,300 discloses a wide variety of drugs that are useful in the methods and compositions described herein, entire contents of which, including a variety of drugs, are incorporated herein by reference. Drugs contemplated for use in the compositions described in U.S. Pat. No. 6,395,300 and herein disclosed include the following categories and examples of drugs and alternative forms of these drugs such as alternative salt forms, free acid forms, free base forms, and hydrates: analgesics/antipyretics. (e.g., aspirin, acetaminophen, ibuprofen, naproxen sodium, buprenorphine, propoxyphene hydrochloride, propoxyphene napsylate, meperidine hydrochloride, hydromorphone hydrochloide, morphine, oxycodone, codeine, dihydrocodeine bitartrate, pentazocine, hydrocodone bitartrate, levorphanol, diflunisal, trolamine salicylate, nalbuphine hydrochloride, mefenamic acid, butorphanol, choline salicylate, butalbital, phenyltoloxamine citrate, diphenhydramine citrate, methotrimeprazine, cinnamedrine hydrochloride, and meprobamate); antiasthamatics (e.g., ketotifen and traxanox); antibiotics (e.g., neomycin, streptomycin, chloramphenicol, cephalosporin, ampicillin, penicillin, tetracycline, and ciprofloxacin); antidepressants (e.g., nefopam, oxypertine, doxepin, amoxapine, trazodone, amitriptyline, maprotiline, pheneizine, desipramine, nortriptyline, tranylcypromine, fluoxetine, doxepin, imipramine, imipramine pamoate, isocarboxazid, trimipramine, and protriptyline); antidiabetics (e.g., biguanides and sulfonylurea derivatives); antifungal agents (e.g., griseofulvin, ketoconazole, itraconizole, amphotericin B, nystatin, and candicidin); antihypertensive agents (e.g., propanolol, propafenone, oxyprenolol, nifedipine, reserpine, trimethaphan, phenoxybenzamine, pargyline hydrochloride, deserpidine, diazoxide, guanethidine monosulfate, minoxidil, rescinnamine, sodium nitroprusside, rauwolfia serpentina, alseroxylon, and phentolamine); anti-inflammatories (e.g., (non-steroidal) indomethacin, ketoprofen, flurbiprofen, naproxen, ibuprofen, ramifenazone, piroxicam, (steroidal) cortisone, dexamethasone, fluazacort, celecoxib, rofecoxib, hydrocortisone, prednisolone, and prednisone); antineoplastics (e.g., cyclophosphamide, actinomycin, bleomycin, daunorubicin, doxorubicin, epirubicin, mitomycin, methotrexate, fluorouracil, carboplatin, carmustine (BCNU), methyl-CCNU, cisplatin, etoposide, camptothecin and derivatives thereof, phenesterine, paclitaxel and derivatives thereof, docetaxel and derivatives thereof, vinblastine, vincristine, tamoxifen, and piposulfan); antianxiety agents (e.g., lorazepam, buspirone, prazepam, chlordiazepoxide, oxazepam, clorazepate dipotassium, diazepam, hydroxyzine pamoate, hydroxyzine hydrochloride, alprazolam, droperidol, halazepam, chlormezanone, and dantrolene); immunosuppressive agents (e.g., cyclosporine, azathioprine, mizoribine, and FK506 (tacrolimus)); antimigraine agents (e.g., ergotamine, propanolol, isometheptene mucate, and dichloralphenazone); sedatives/hypnotics (e.g., barbiturates such as pentobarbital, pentobarbital, and secobarbital; and benzodiazapines such as flurazepam hydrochloride, triazolam, and midazolam); antianginal agents (e.g., beta-adrenergic blockers; calcium channel blockers such as nifedipine, and diltiazem; and nitrates such as nitroglycerin, isosorbide dinitrate, pentearythritol tetranitrate, and erythrityl tetranitrate); antipsychotic agents (e.g., haloperidol, loxapine succinate, loxapine hydrochloride, thioridazine, thioridazine hydrochloride, thiothixene, fluphenazine, fluphenazine decanoate, fluphenazine enanthate, trifluoperazine, chlorpromazine, perphenazine, lithium citrate, and prochlorperazine); antimanic agents (e.g., lithium carbonate); antiarrhythmics (e.g., bretylium tosylate, esmolol, verapamil, amiodarone, encainide, digoxin, digitoxin, mexiletine, disopyramide phosphate, procainamide, quinidine sulfate, quinidine gluconate, quinidine polygalacturonate, flecainide acetate, tocainide, and lidocaine); antiarthritic agents (e.g., phenylbutazone, sulindac, penicillanine, salsalate, piroxicam, azathioprine, indomethacin, meclofenamate, gold sodium thiomalate, ketoprofen, auranofin, aurothioglucose, and tolmetin sodium); antigout agents (e.g., colchicine, and allopurinol); anticoagulants (e.g., heparin, heparin sodium, and warfarin sodium); thrombolytic agents (e.g., urokinase, streptokinase, and alteplase); antifibrinolytic agents (e.g., aminocaproic acid); hemorheologic agents (e.g., pentoxifylline); antiplatelet agents (e.g., aspirin); anticonvulsants (e.g., valproic acid, divalproex sodium, phenyloin, phenyloin sodium, clonazepam, primidone, phenobarbitol, carbamazepine, amobarbital sodium, methsuximide, metharbital, mephobarbital, mephenyloin, phensuximide, paramethadione, ethotoin, phenacemide, secobarbitol sodium, clorazepate dipotassium, and trimethadione); antiparkinson agents (e.g., ethosuximide); antihistamines/antipruritics (e.g., hydroxyzine, diphenhydramine, chlorpheniramine, brompheniramine maleate, cyproheptadine hydrochloride, terfenadine, clemastine fumarate, triprolidine, carbinoxamine, diphenylpyraline, phenindamine, azatadine, tripelennamine, dexchlorpheniramine maleate, methdilazine; agents useful for calcium regulation (e.g., calcitonin, and parathyroid hormone); antibacterial agents (e.g., amikacin sulfate, aztreonam, chloramphenicol, chloramphenicol palirtate, ciprofloxacin, clindamycin, clindamycin palmitate, clindamycin phosphate, metronidazole, metronidazole hydrochloride, gentamicin sulfate, lincomycin hydrochloride, tobramycin sulfate, vancomycin hydrochloride, polymyxin B sulfate, colistimethate sodium, and colistin sulfate); antiviral agents (e.g., interferon alpha, beta or gamma, zidovudine, amantadine hydrochloride, ribavirin, and acyclovir); antimicrobials (e.g., cephalosporins such as cefazolin sodium, cephradine, cefaclor, cephapirin sodium, ceftizoxime sodium, cefoperazone sodium, cefotetan disodium, cefuroxime e azotil, cefotaxime sodium, cefadroxil monohydrate, cephalexin, cephalothin sodium, cephalexin hydrochloride monohydrate, cefamandole nafate, cefoxitin sodium, cefonicid sodium, ceforamide, ceftriaxone sodium, ceftazidime, cefadroxil, cephradine, and cefuroxime sodium; penicillins such as ampicillin, amoxicillin, penicillin G benzathine, cyclacillin, ampicillin sodium, penicillin G potassium, penicillin V potassium, piperacillin sodium, oxacillin sodium, bacampicillin hydrochloride, cloxacillin sodium, ticarcillin disodium, aziocillin sodium, carbenicillin indanyl sodium, penicillin G procaine, methicillin sodium, and nafcillin sodium; erythromycins such as erythromycin ethylsuccinate, erythromycin, erythromycin estolate, erythromycin lactobionate, erythromycin stearate, and erythromycin ethylsuccinate; and tetracyclines such as tetracycline hydrochloride, doxycycline hyclate, and minocycline hydrochloride, azithromycin, clarithromycin); anti-infectives (e.g., GM-CSF); bronchodilators (e.g., sympathomimetics such as epinephrine hydrochloride, metaproterenol sulfate, terbutaline sulfate, isoetharine, isoetharine mesylate, isoetharine hydrochloride, albuterol sulfate, albuterol, bitolterolmesylate, isoproterenol hydrochloride, terbutaline sulfate, epinephrine bitartrate, metaproterenol sulfate, epinephrine, and epinephrine bitartrate; anticholinergic agents such as ipratropium bromide; xanthines such as aminophylline, dyphylline, metaproterenol sulfate, and aminophylline; mast cell stabilizers such as cromolyn sodium; inhalant corticosteroids such as beclomethasone dipropionate (BDP), and beclomethasone dipropionate monohydrate; salbutamol; ipratropium bromide; budesonide; ketotifen; salmeterol; xinafoate; terbutaline sulfate; triamcinolone; theophylline; nedocromil sodium; metaproterenol sulfate; albuterol; flunisolide; fluticasone proprionate; steroidal compounds and hormones (e.g., androgens such as danazol, testosterone cypionate, fluoxymesterone, ethyltestosterone, testosterone enathate, methyltestosterone, fluoxymesterone, and testosterone cypionate; estrogens such as estradiol, estropipate, and conjugated estrogens; progestins such as methoxyprogesterone acetate, and norethindrone acetate; corticosteroids such as triamcinolone, betamethasone, betamethasone sodium phosphate, dexamethasone, dexamethasone sodium phosphate, dexamethasone acetate, prednisone, methylprednisolone acetate suspension, triamcinolone acetonide, methylprednisolone, prednisolone sodium phosphate, methylprednisolone sodium succinate, hydrocortisone sodium succinate, triamcinolone hexacetonide, hydrocortisone, hydrocortisone cypionate, prednisolone, fludrocortisone acetate, paramethasone acetate, prednisolone tebutate, prednisolone acetate, prednisolone sodium phosphate, and hydrocortisone sodium succinate; and thyroid hormones such as levothyroxine sodium); hypoglycemic agents (e.g., human insulin, purified beef insulin, purified pork insulin, glyburide, chlorpropamide, glipizide, tolbutamide, and tolazamide); hypolipidemic agents (e.g., clofibrate, dextrothyroxine sodium, probucol, pravastitin, atorvastatin, lovastatin, and niacin); proteins (e.g., DNase, alginase, superoxide dismutase, and lipase); nucleic acids (e.g., sense or anti-sense nucleic acids encoding any therapeutically useful protein, including any of the proteins described herein); agents useful for erythropoiesis stimulation (e.g., erythropoietin); antiulcer/antireflux agents (e.g., famotidine, cimetidine, and ranitidine hydrochloride); antinauseants/antiemetics (e.g., meclizine hydrochloride, nabilone, prochlorperazine, dimenhydrinate, promethazine hydrochloride, thiethylperazine, and scopolamine); as well as other drugs useful in the compositions and methods described herein include mitotane, halonitrosoureas, anthrocyclines, ellipticine, ceftriaxone, ketoconazole, ceftazidime, oxaprozin, albuterol, valacyclovir, urofollitropin, famciclovir, flutamide, enalapril, mefformin, itraconazole, buspirone, gabapentin, fosinopril, tramadol, acarbose, lorazepan, follitropin, glipizide, omeprazole, fluoxetine, lisinopril, tramsdol, levofloxacin, zafirlukast, interferon, growth hormone, interleukin, erythropoietin, granulocyte stimulating factor, nizatidine, bupropion, perindopril, erbumine, adenosine, alendronate, alprostadil, benazepril, betaxolol, bleomycin sulfate, dexfenfluramine, diltiazem, fentanyl, flecainid, gemcitabine, glatiramer acetate, granisetron, lamivudine, mangafodipir trisodium, mesalamine, metoprolol fumarate, metronidazole, miglitol, moexipril, monteleukast, octreotide acetate, olopatadine, paricalcitol, somatropin, sumatriptan succinate, tacrine, verapamil, nabumetone, trovafloxacin, dolasetron, zidovudine, finasteride, tobramycin, isradipine, tolcapone, enoxaparin, fluconazole, lansoprazole, terbinafine, pamidronate, didanosine, diclofenac, cisapride, venlafaxine, troglitazone, fluvastatin, losartan, imiglucerase, donepezil, olanzapine, valsartan, fexofenadine, calcitonin, and ipratropium bromide. These drugs are generally considered to be water soluble.” Any of these water-soluble drugs may be used as precursors in the process of this invention to make a composition with the desired magnetic properties.

[0351] As is also disclosed in U.S. Pat. No. 6,624,138, “Preferred drugs useful in the present invention may include albuterol, adapalene, doxazosin mesylate, mometasone furoate, ursodiol, amphotericin, enalapril maleate, felodipine, nefazodone hydrochloride, valrubicin, albendazole, conjugated estrogens, medroxyprogesterone acetate, nicardipine hydrochloride, zolpidem tartrate, amlodipine besylate, ethinyl estradiol, omeprazole, rubitecan, amlodipine besylate/benazepril hydrochloride, etodolac, paroxetine hydrochloride, paclitaxel, atovaquone, felodipine, podofilox, paricalcitol, betamethasone dipropionate, fentanyl, pramipexole dihydrochloride, Vitamin D3 and related analogues, finasteride, quetiapine fumarate, alprostadil, candesartan, cilexetil, fluconazole, ritonavir, busulfan, carbamazepine, flumazenil, risperidone, carbemazepine, carbidopa, levodopa, ganciclovir, saquinavir, amprenavir, carboplatin, glyburide, sertraline hydrochloride, rofecoxib carvedilol, halobetasolproprionate, sildenafil citrate, celecoxib, chlorthalidone, imiquimod, simvastatin, citalopram, ciprofloxacin, irinotecan hydrochloride, sparfloxacin, efavirenz, cisapride monohydrate, lansoprazole, tamsulosin hydrochloride, mofafinil, clarithromycin, letrozole, terbinafine hydrochloride, rosiglitazone maleate, diclofenac sodium, lomefloxacin hydrochloride, tirofiban hydrochloride, telmisartan, diazapam, loratadine, toremifene citrate, thalidomide, dinoprostone, mefloquine hydrochloride, trandolapril, docetaxel, mitoxantrone hydrochloride, tretinoin, etodolac, triamcinolone acetate, estradiol, ursodiol, nelfinavir mesylate, indinavir, beclomethasone dipropionate, oxaprozin, flutamide, famotidine, nifedipine, prednisone, cefuroxime, lorazepam, digoxin, lovastatin, griseofulvin, naproxen, ibuprofen, isotretinoin, tamoxifen citrate, nimodipine, amiodarone, and alprazolam. Specific non-limiting examples of some drugs that fall under the above categories include paclitaxel, docetaxel and derivatives, epothilones, nitric oxide release agents, heparin, aspirin, coumadin, PPACK, hirudin, polypeptide from angiostatin and endostatin, methotrexate, 5-fluorouracil, estradiol, P-selectin Glycoprotein ligand-1 chimera, abciximab, exochelin, eleutherobin and sarcodictyin, fludarabine, sirolimus, tranilast, VEGF, transforming growth factor (TGF)-beta, Insulin-like growth factor (IGF), platelet derived growth factor (PDGF), fibroblast growth factor (FGF), RGD peptide, beta or gamma ray emitter (radioactive) agents, and dexamethasone, tacrolimus, actinomycin-D, batimastat etc.” These drugs also may be used in the process of this invention to make magnetic compositons.

Another Preferred Compound of the Invention

[0352] In another embodiment of this invention, there is provided a compound that, in spite of having a molecular weight in excess of 550, still has a water solubility in excess of about 10 micrograms per milliliter. In particular, there is provided a compound with a molecular weight of at least about 550, a water solubility of at least about 10 micrograms per milliliter, a pKa dissociation constant of from about 1 to about 15, and a partition coefficient of from about 1.0 to about 50.

[0353] The compound of this embodiment of the invention has a molecular weight of at least about 550. In one embodiment, this compound has a molecular weight of at least about 700.

[0354] The water solubility of this compound is at least about 1 micrograms per milliliter and, more preferably, at least about 10 micrograms per milliliter. In one embodiment, such compound has a water solubility of at least about 100 micrograms per milliliter. In yet another embodiment, such compound has a water solubility of at least about 1,000 micrograms per milliliter.

[0355] The compound of this embodiment of the invention has a pKa dissociation constant of from about 1 to about 15. As used herein, the term “pKa dissociation constant” is equal to −log Kₐ, wherein Kₐ is equal to [H₃O⁺] [A⁻]/[HA], wherein the square brackets ([ ]) indicate concentration, and wherein A is the counterion. Reference may be had, e.g., to pages 327-328 of Maitland Jones, Jr.'s “Organic Chemistry” (W.M. Norton & Company, New York, N.Y., 1997). Reference may also be had, e.g., to U.S. Pat. Nos. 5,036,164; 5,025,063; 5,767,066; 5,155,162; 5,132,000; and 5,079,134. The entire disclosure of each of these United States patents is hereby incorporated by reference into this specification

[0356] As is known to those skilled in the art, and as is disclosed at pages 39 et seq. of Stephen H. Curry et al.'s “Manual of Laboratory Phamaconkinetics” (John Wiley & Sons, New York, N.Y., 1983), “Many drugs are weak acids and/or bases. The degree of ionization will influence the absorption, distribution, and excretion in vivo, the solubility at a given pH, the distribution of the drug between aqueous and organic pahses the choice of pH in liquid chromatographic separations, etc. . . . From the above it follows that the pH at which the compound is 50 percent ionized is equal to the pKₐ To determine a value of pKₐ the relative concentrations of ionized and non-ionized forms msut be known at a particular pH. Several methods are available, including potentiometric titration, conductimetry, solubility, and spectrometery . . . . ”

[0357] The compound of this embodiment of the invention preferably has a partition coefficient of from about 1.0 to about 50. This partition coefficient is also dicussed at pages 41 et seq. of the aforementioned Curry book, wherein it is disclosed that: “When a solute is distributed between two immiscible phases, 1 and 2, the ratio of the activities of the solute in the phases is constant. If the solutions are dilute and ideal behavior is assumed, then the ratio of the concentration of the solute will be constant . . . . The constant is known as the partition (or distribution) coefficient . . . . The convention with regard to which phase is classed as 1 and which is as 2 is not entirely clear. Usually, partition coefficients are defined as the concentration in the organic phase divided by the concentration in the aqueous phase.”

[0358] It is preferred to measure the partition coefficient between water and octane. Means for measuring the partition coefficient are well known to those skilled in the art and are described, e.g., in the patent literature. Reference may be had, e.g., to U.S. Pat. Nos. 6,660,288; 6,645,479; 6,585,953; 6,583,136; 6,500,995; 6,475,961; 6,369,001; 6,362,158; 6,315,907; 6,310,013; 6,271,665; 6,218,378; 6,203,817; 6,156,826; 6,124,086; 6,071,409; 6,045,835; 6,042,792; 5,874,481; 5,763,146; 5,555,747; 5,252,320 (complexes having a partition coefficient above 300); U.S. Pat. Nos. 5,254,342; 5,252,320; 5,164,189; 5,071,769; 5,041,523; -5,013,556; 5,011,982; 5,011,967; 4,986,917; 4,980,453; 4,957,862; 4,940,654; 4,886,656; 4,859,584; 4,762,701; 4,746,745; 4,743,550 (method for improving the partition coefficient in enzyme containing systems having at least two phases), U.S. Pat. Nos. 4,736,016; 4,721,730; 4,699,924; 4,619,939; 4,420,473; 4,371,540; 4,363,793; and the like. The entire disclosure of each of these United States patents is hereby incorporated by reference into this specification.

[0359] In one embodiment, the compound of this invention has a tumor uptake of at least about 10 percent and, more preferably, at least about 20 percent. In one embodiment, the tumor uptake is at least about 30 percent. In yet another embodiment, the tumor uptake is at least about 50 percent. In yet another embodiment, the tumor uptake is at least about 70 percent.

[0360] Tumor uptake is the extent to which the compound is selectively taken up by tumors from blood. It may be determined by dissolving 1 milligram of the compound to be tested in 1 milliliter of “Cremophor EL,” a 1:1 (volume/volume) mixture of anhydrous ethanol and polyethoxylated castor oil. For a discussion of such “Cremophor EL,” reference may be had, e.g., to U.S. Pat. No. 5,591,715 (methods and compositions for reducing multidrug resistance), U.S. Pat. No. 5,686,488 (polyethoxylated castor oil products as anti-inflammatory agents), U.S. Pat. No. 5,776,891 (compositions for reducing multidrug resistance), and the like. The entire disclosure4 of each of these United States patents is hereby incorporated by reference into this specification.

[0361] The mixture of the compound to be tested and “Cremophor EL” is injected ito the blood supply (artery) of a laboratory rat, near the tumor. Thirty seconds later the rate is sacrificed, the tumor is removed, and it and the blood are analyzed for the presence of the compound. Both the arterial blood and the venous drainage beyond the tumor are analyzed. The percent tumor uptake is equal to ([Cₐ-C_{y}]/Cₐ)×100, wherein Cₐ is the concentration of the compound in the arterial blood, and Cᵥ is the concentration of the compound in the venous blood.

[0362] Other conventional means may be used to determine the tumor uptake. Reference may be had, e.g., to U.S. Pat. Nos. 4,448,762; 5,077,034; 5,094,835; 5,135,717; 5,166,944; 5,284,831; 5,391,547; 5,399,338; 5,474,772; 5,516,940; 5,578,287; 5,595,738; 5,601,800; 5,608,060; 5,616,690; 5,624,798; 5,624,896; 5,683,873; 5,688,501; 5,753,262; 5,762,909; 5,783,169; 5,810,888; 5,811,073; 5,820,873; 5,847,121; 5,869,248; 5,877,162; 5,891,689; 5,902,604; 5,911,969; 5,914,312; 5,955,605; 5,965,598; 5,976,535; 5,976,874; 6,008,319; 6,022,522; 6,022,966; 6,025,165; 6,027,725; 6,057,153; 6,074,626; 6,103,889; 6,121,424; 6,165,441; 6,171,577; 6,172,045; 6,197,333; 6,217,869; 6,217,886; 6,235,264; 6,242,477; 6,331,287; 6,348,214; 6,358,490; 6,403,096; 6,426,400; 6,436,708; 6,441,158; 6,458,336; 6,498,181; 6,515,110; 6,537,521; 6,610,478; 6,617,135; 6,620,805; 6,624,187; 6,723,318; 6,734,171; 6,685,915; and the like. The entire disclosure of each of these United States patents is hereby incorporated by reference into this specification.

Guided Delivery of the Compounds of this Invention

[0363] In one preferred embodiment, the magnetic properties of the anti-mitotic compound of this invention are used in order to preferentially deliver such compound to a specified site. In another embodiment, the magnetic properties of the compounds and compositions of this invention which are not necessarily anti-mitotic but have the desired magnetic properties also may be used to deliver such compounds and/or compositions to a desired site.

[0364] Thus, by way of illustration, one may guide delivery of the compound of this invention with conventional magnetic focusing means. In one aspect of this embodiment, a magnetic field of a specified strength is focused onto a desired therapeutic site, such as a tumor to be treated, whereby the compound is selectively drawn to the therapeutic site and binds with tubulin moleuces at the site. In one embodiment, the focused magnetic field has a field strength of at least about 6 Tesla in order to cause microtubules to move linearly. The magnetic field may, e.g., be focused for a period of at least about 30 minutes following the administration of the compound of this invention.

[0365] One may use any of the conventional magnetic field generators known to those skilled in the art to produce such a magnetic field. Thus, e.g., one may use one or more of the magnetic field generators disclosed in U.S. Pat. Nos. 6,503,364; 6,377,149 (magnetic field generator for magnetron plasma generation); U.S. Pat. No. 6,353,375 (magnetostatic wave device); U.S. Pat. No. 6,340,888 (magnetic field generator for MRI); U.S. Pat. Nos. 6,336,989; 6,335,617 (device for calibrating a magnetic field generator); U.S. Pat. Nos. 6,313,632; 6,297,634; 6,275,128; 6,246,066 (magnetic field generator and charged particle beam irradiator); U.S. Pat. No. 6,114,929 (magnetostatic wave device); U.S. Pat. No. 6,099,459 (magnetic field generating device and method of generating and applying a magnetic field); U.S. Pat. Nos. 5,795,212; 6,106,380 (deterministic magnetorheological finishing); U.S. Pat. No. 5,839,944 (apparatus for deterministic magnetorheological finishing); U.S. Pat. No. 5,971,835 (system for abrasive jet shaping and polishing of a surface using a magnetorheological fluid); U.S. Pat. Nos. 5,951,369; 6,506,102 (system for magnetorheological finishing of substrates); U.S. Pat. Nos. 6,267,651; 6,309,285 (magnetic wiper); U.S. Pat. Nos. 5,929,732 and 6,488,615 (which describe devices and methods for creating a high intensity magnetic field for magnetically guiding a anti-mitotic compound to a predetermined site within a biological organism), and the like. The entire disclosure of each of these United States patents is hereby incorporated by reference into this specification.

The use of Externally Applied Energy to Affect an Implanted Medical Device

[0366] The prior art discloses many devices in which an externally applied electromagnetic field (i.e., a field originating outside of a biological organism, such as a human body) is generated in order to influence one or more implantable devices disposed within the biological organism; these may be used in conjunction with anti-mitotic compound of this invention. Some of these devices are described below.

[0367] U.S. Pat. No. 3,337,776 describes a device for producing controllable low frequency magnetic fields; the entire disclosure of this patent is hereby incorporated by reference into this specification. Thus, e.g., claim 1 of this patent describes a biomedical apparatus for the treatment of a subject with controllable low frequency magnetic fields, comprising solenoid means for creating the magnetic field. These low-frequency magnetic fields may be used to affect the anti-mitotic compounds of this invention, and/or tubulin and/or microtubules and/or other moieties.

[0368] U.S. Pat. No. 3,890,953 also discloses an apparatus for promoting the growth of bone and other body tissues by the application of a low frequency alternating magnetic field; the entire disclosure of this United States patent is hereby incorporated by reference into this specification. This patent claims “In an electrical apparatus for promoting the growth of bone and other body tissues by the application thereto of a low frequency alternating magnetic field, such apparatus having current generating means and field applicator means, the improvement wherein the applicator means comprises a flat solenoid coil having an axis about which the coil is wound and composed of a plurality of parallel and flexible windings, each said winding having two adjacent elongate portions and two 180° coil bends joining said elongate portions together, said coil being flexible in the coil plane in the region of said elongate portion for being bent into a U-shape, said coil being bent into such U-shape about an axis parallel to the coil axis and adapted for connection to a source of low frequency alternating current.” These low-frequency magnetic fields may be used to affect the anti-mitotic compounds of this invention, and/or tubulin and/or microtubules and/or other moieties.

[0369] The device of U.S. Pat. No. 3,890,953 is described, in part, at lines 52 et seq. of column 2, wherein it is disclosed that: “.The apparatus shown diagrammatically in FIG. 1 comprises a AC generator 10, which supplies low frequency AC at the output terminals 12. The frequency of the AC lies below 150 Hz, for instance between 1 and 50 or 65 Hz. It has been found particularly favorable to use a frequency range between 5 or 10 and 30 Hz, for example 25 Hz. The half cycles of the alternating current should have comparatively gently sloping leading and trailing flanks (rise and fall times of the half cycles being for example in the order of magnitude of a quarter to an eighth of the length of a cycle); the AC can thus be a sinusoidal current with a low non-linear distortion, for example less than 20 percent, or preferably less than 10 percent, or a triangular wave current.”

[0370] U.S. Pat. No. 4,095,588 discloses a “vascular cleansing device” adapted to “ . . . effect motion of the red corpuscles in the blood stream of a vascular system . . . whereby these red cells may cleanse the vascular system by scrubbing the walls thereof . . . ;” the entire disclosure of this United States patent is hereby incorporated by reference into this specification. This patent claims (in claim 3) “A means to propel a red corpuscle in a vibratory and rotary fashion, said means comprising an electronic circuit and magnetic means including: a source of electrical energy; a variable oscillator connected to said source; a binary counter means connected to said oscillator to produce sequential outputs; a plurality of deflection amplifier means connected to be operable by the outputs of said binary counter means in a sequential manner, said amplifier means thereby controlling electrical energy from said source; a plurality of separate coils connected in separate pairs about an axis in series between said deflection amplifier means and said source so as to be sequentially operated in creating an electromagnetic field from one coil to the other and back again and thence to adjacent separate coils for rotation of the electromagnetic field from one pair of coils to another; and a table within the space encircled by said plurality of coils, said table being located so as to place a person along the axis such that the red corpuscles of the person's vascular system are within the electromagnetic field between the coils creating same.” The energy used to affect such red blood corpuscles may also be used affect the anti-mitotic compounds of this invention, and/or tubulin and/or microtubules and/or other moieties.

[0371] U.S. Pat. No. 4,323,075 discloses an implantable defibrillator with a rechargeable power supply; the entire disclosure of this patent is hereby incorporated by reference into this specification. Claim 1 of this patent describes “A fully implantable power supply for use in a fully implantable defibrillator having an implantable housing, a fibrillation detector for detecting fibrillation of the heart of a recipient, an energy storage and discharge device for storing and releasing defibrillation energy into the heart of the recipient and an inverter for charging the energy storage and discharge device in response to detection of fibrillation by the fibrillation detector, the inverter requiring a first level of power to be operational and the fibrillation detector requiring a second level of power different from said first level of power to be operational, said power supply comprising: implantable battery means positioned within said implantable housing, said battery means including a plurality of batteries arranged in series, each of said batteries having a pair of output terminals, each of said batteries producing a distinctly multilevel voltage across its pair of output terminals, said voltage being at a first level when the battery is fully charged and dropping to a second level at some point during the discharge of the battery; and implantable circuit means positioned within said implantable housing, said circuit means for creating a first conductive path betwen said serially-connected batteries and said fibrillation detector to provide said fibrillation detector with said second level of power, and for creating a second conductive path between said inverter and said battery means by placing only the batteries operating at said first level voltage in said second conductive path, and excluding the remaining batteries from said second conductive path to provide said inverter with said first level of power.” The power supply of this patent may be used to power, e.g., one or more magnetic focusing devices.

[0372] U.S. Pat. No. 4,340,038 discloses an implanted medical system comprised of magnetic field pick-up means for converting magnetic energy to electrical energy; the entire disclosure of this patentis hereby incorporated by reference into this specification. One may use the electrical energy produced by such pick-up means to affect the anti-mitotic compounds of this invention, and/or tubulin and/or microtubules and/or other moieties. Such energy may also be used to power an implanted magnetic focusing device.

[0373] In column 1 of U.S. Pat. No. 4,340,038, at lines 12 et seq., it is disclosed that “Many types of implantable devices incorporate a self-contained transducer for converting magnetic energy from an externally-located magnetic field generator to energy usable by the implanted device. In such a system having an implanted device and an externally-located magnetic field generator for powering the device, sizing and design of the power transfer system is important. In order to properly design the power transfer system while at the same time avoiding overdesign, the distance from the implanted device to the magnetic field generator must be known. However for some types of implanted devices the depth of the implanted device in a recipient's body is variable, and is not known until the time of implantation by a surgeon. One example of such a device is an intracranial pressure monitoring device (ICPM) wherein skull thickness varies considerably between recipients and the device must be located so that it protrudes slightly below the inner surface of the skull and contacts the dura, thereby resulting in a variable distance between the top of the implanted device containing a pick-up coil or transducer and the outer surface of the skull. One conventional technique for accommodating an unknown distance between the magnetic field generator and the implanted device includes increasing the transmission power of the external magnetic field generator. However this increased power can result in heating of the implanted device, the excess heat being potentially hazardous to the recipient. A further technique has been to increase the diameter of the pick-up coil in the implanted device. However, physical size constraints imposed on many implanted devices such as the ICPM are critical; and increasing the diameter of the pick-up coil is undesirable in that it increases the size of the orifice which must be formed in the recipient's skull. The concentrator of the present invention solves the above problems by concentrating magnetic lines of flux from the magnetic generator at the implanted pick-up coil, the concentrator being adapted to accommodate distance variations between the implanted device and the magnetic field generator.”

[0374] Claim 1 of U.S. Pat. No. 4,340,038 describes “In a system including an implanted device having a magnetic field pick-up means for converting magnetic energy to electrical energy for energizing said implanted device, and an external magnetic field generator located so that magnetic lines of flux generated thereby intersect said pick-up means, a means for concentrating a portion of said magnetic lines of flux at said pick-up means comprising a metallic slug located between said generator and said pick-up means, thereby concentrating said magnetic lines of flux at said pick-up means.” Claim 5 of this patent further describes the pick-up means as comprising “ . . . a magnetic pick-up coil and said slug is formed in the shape of a truncated cone and oriented so that a plane defined by the smaller of said cone end surfaces is adjacent to said substantially parallel to a plane defined by said magnetic pick-up coil.” In one embodiment, such pick-up means may be located near the site to be treated (such as a tumor) and may be used to affect the tumor by, e.g., hyperthermia treatement.

[0375] U.S. Pat. No. 4,361,153 discloses an implantable telemetry system; the entire disclosure of such United States patent is hereby incorporated by reference into this specification. Such an implantable telemetry system, equipped with a multiplicity of sensors, may be used to report how the anti-mitotic compounds of this invention, and/or tubulin and/or microtubules and/or other moieties respond to applied electromagnetic fields.

[0376] As is disclosed at column 1 of U.S. Pat. No. 4,361,153 (see lines 9 et seq.), “Externally applied oscillating magnetic fields have been used before with implanted devices. Early inductive cardiac pacers employed externally generated electromagnetic energy directly as a power source. A coil inside the implant operated as a secondary transformer winding and was interconnected with the stimulating electrodes. More recently, implanted stimulators with rechargeable (e.g., nickel cadmium) batteries have used magnetic transmission to couple energy into a secondary winding in the implant to energize a recharging circuit having suitable rectifier circuitry. Miniature reed switches have been utilized before for implant communications. They appear to have been first used to allow the patient to convert from standby or demand mode to fixed rate pacing with an external magnet. Later, with the advent of programmable stimulators, reed switches were rapidly cycled by magnetic pulse transmission to operate pulse parameter selection circuitry inside the implant. Systems analogous to conventional two-way radio frequency (RF) and optical communication system have also been proposed. The increasing versatility of implanted stimulators demands more complex programming capabilities. While various systems for transmitting data into the implant have been proposed, there is a parallel need to develop compatible telemetry systems for signalling out of the implant. However, the austere energy budget constraints imposed by long life, battery operated implants rule out conventional transmitters and analogous systems”

[0377] The solution provided by U.S. Pat. No. 4,361,153 is “ . . . achieved by the use of a resonant impedance modulated transponder in the implant to modulate the phase of a relatively high energy reflected magnetic carrier imposed from outside of the body.” In particular, and as is described by claim 1 of this patent, there is claimed “An apparatus for communicating variable information to an external device from an electronic stimulator implanted in a living human patient, comprising an external unit including means for transmitting a carrier signal, a hermetically sealed fully implantable enclosure adapted to be implanted at a fixed location in the patient's body, means within said enclosure for generating stimulator outputs, a transponder within said enclosure including tuned resonant circuit means for resonating at the frequency of said carrier signal so as to re-radiate a signal at the frequency of said carrier signal, and means for superimposing an information signal on the reflected signal by altering the resonance of said tuned circuit means in accordance with an information signal, said superimposing means including a variable impedance load connected across said tuned circuit and means for varying the impedance of said load in accordance with an information signal, said external unit further including pickup means for receiving the reflected signal from said transponder and means for recovering the information signal superimposed thereon, said receiving means including means reponsive to said reflected signal from said transponder for producing on associated analog output signal, and said recovering means including phase shift detector means responsive to said analog output signal for producing an output signal related to the relative phase angle thereof.”

[0378] U.S. Pat. No. 4,408,607 discloses a rechargeable, implantable capacitive energy source; the entire disclosure of this patent is hereby incorporated into this specification by reference; and this source may be used to directly or indirectly supply energy to one or more of the anti-mitotic compounds of this invention, and/or tubulin and/or microtubules and/or other moieties. As is disclosed in column 1 of such patent (at lines 12 et seq.), “Medical science has advanced to the point where it is possible to implant directly within living bodies electrical devices necessary or advantageous to the welfare of individual patients. A problem with such devices is how to supply the electrical energy necessary for their continued operation. The devices are, of course, designed to require a minimum of electrical energy, so that extended operation from batteries may be possible. Lithium batteries and other primary, non-rechargeable cells may be used, but they are expensive and require replacement of surgical procedures. Nickel-cadmium and other rechargeable batteries are also available, but have limited charge-recharge characteristics, require long intervals for recharging, and release gas during the charging process.”

[0379] The solution to this problem is described, e.g., in claim 1 of the patent, which describes “An electric power supply for providing electrical energy to an electrically operated medical device comprising: capacitor means for accommodating an electric charge; first means providing a regulated source of unidirectional electrical energy; second means connecting said first means to said capacitor means for supplying charging current to said capacitor means at a first voltage which increases with charge in the capacitor means; third means deriving from said first means a comparison second voltage of constant magnitude; comparator means operative when said first voltage reaches a first value to reduce said first voltage to a second, lower value; and voltage regulator means connected to said capacitor means and medical device to limit the voltage supplied to the medical device.”

[0380] U.S. Pat. No. 4,416,283 discloses an implantable shunted coil telemetry transponder employed as a magnetic pulse transducer for receiving externally transmitted data; the entire disclosure of this United States patent is hereby incorporated by reference into this specification. This transponder may be used in a manner similar to that of the aforementioned telemetry system.

[0381] In particular, a programming system for a biomedical implant is described in claim 1 of U.S. Pat. No. 4,416,283. Such claim 1 discloses “In a programming system for a biomedical implant of the type wherein an external programmer produces a series of magnetic impulses which are received and transduced to form a corresponding electrical pulse input to programmable parameter data registers inside the implant, wherein the improvement comprises external programming pulse receiving and transducing circuitry in the implant including a tuned coil, means responsive to pairs of successive voltage spikes of opposite polarity magnetically induced across said tuned coil by said magnetic impulses for forming corresponding binary pulses duplicating said externally generated magnetic impulses giving rise to said spikes, and means for outputting said binary pulses to said data registers to accomplish programming of the implant.”

[0382] U.S. Pat. No. 4,871,351 discloses an implantable pump infusion system; the entire disclosure of this United States patent is hereby incorporated by reference into this specification. These implantable pumps are discussed in column 1 of the patent, wherein it is disclosed that: “Certain human disorders, such as diabetes, require the injection into the body of prescribed amounts of medication at prescribed times or in response to particular conditions or events. Various kinds of infusion pumps have been propounded for infusing drugs or other chemicals or solutions into the body at continuous rates or measured dosages. Examples of such known infusion pumps and dispensing devices are found in U.S. Pat. Nos. 3,731,861; 3,692,027; 3,923,060; 4,003,379; 3,951,147; 4,193,397; 4,221,219 and 4,258,711. Some of the known pumps are external and inject the drugs or other medication into the body via a catheter, but the preferred pumps are those which are fully implantable in the human body.” One may use the implantable pumps of this patent to delivery the anti-mitotic compound of this invention to a specified site and, thereafter, to “finely focus” such delivery by means of magnetic focusing means.

[0383] U.S. Pat. No. 4,871,351 also discloses that: “Implantable pumps have been used in infusion systems such as those disclosed in U.S. Pat. Nos. 4,077,405; 4,282,872; 4,270,532; 4,360,019 and 4,373,527. Such infusion systems are of the open loop type. That is, the systems are pre-programmed to deliver a desired rate of infusion. The rate of infusion may be programmed to vary with time and the particular patient. A major disadvantage of such open loop systems is that they are not responsive to the current condition of the patient, i.e. they do not have feedback information. Thus, an infusion system of the open loop type may continue dispensing medication according to its pre-programmed rate or profile when, in fact, it may not be needed.”

[0384] U.S. Pat. No. 4,871,351 also discloses that: “There are known closed loop infusion systems which are designed to control a particular condition of the body, e.g. the blood glucose concentration. Such systems use feedback control continuously, i.e. the patient's blood is withdrawn via an intravenous catheter and analysed continuously and a computer output signal is derived from the actual blood glucose concentration to drive a pump which infuses insulin at a rate corresponding to the signal. The known closed loop systems suffer from several disadvantages. First, since they monitor the blood glucose concentration continuously they are complex and relatively bulky systems external to the patient, and restrict the movement of the patient. Such systems are suitable only for hospital bedside applications for short periods of time and require highly trained operating staff. Further, some of the known closed loop systems do not allow for manually input overriding commands. Examples of closed loop systems are found in U.S. Pat. Nos. 4,055,175; 4,151,845 and 4,245,634.”

[0385] U.S. Pat. No. 4,871,351 also discloses that “An implanted closed loop system with some degree of external control is disclosed in U.S. Pat. No. 4,146,029. In that system, a sensor (either implanted or external) is arranged on the body to sense some kind of physiological, chemical, electrical or other condition at a particular site and produced data which corresponds to the sensed condition at the sensed site. This data is fed directly to an implanted microprocessor controlled medication dispensing device. A predetermined amount of medication is dispensed in response to the sensed condition according to a pre-programmed algorithm in the microprocessor control unit. An extra-corporeal coding pulse transmitter is provided for selecting between different algorithms in the microprocessor control unit. The system of U.S. Pat. No. 4,146,029 is suitable for use in treating only certain ailments such as cardiac conditions. It is unsuitable as a blood glucose control system for example, since (i) it is not practicable to measure the blood glucose concentration continuously with an implanted sensor and (ii) the known system is incapable of dispensing discrete doses of insulin in response to certain events, such as meals and exercise. Furthermore, there are several disadvantages to internal sensors; namely, due to drift, lack of regular calibration and limited life, internal sensors do not have high long-term reliability. If an external sensor is used with the system of U.S. Pat. No. 4,146,029, the output of the sensor must be fed through the patient's skin to the implanted mechanism. There are inherent disadvantages to such a system, namely the high risk of infection. Since the algorithms which control the rate of infusion are programmed into the implanted unit, it is not possible to upgrade these algorithms without surgery. The extra-corporeal controller merely selects a particular one of several medication programs but cannot actually alter a program.”

[0386] U.S. Pat. No. 4,871,351 also discloses that “It is an object of the present invention to overcome, or substantially ameliorate the above described disadvantages of the prior art by providing an implantable open loop medication infusion system with a feedback control option”

[0387] The solution to this problem is set forth in claim 1 of U.S. Pat. No. 4,871,351, which describes: “A medical infusion system intermittently switchable at selected times between an open loop system without feedback and a closed loop system with feedback, said system comprising an implantable unit including means for controllably dispensing medication into a body, an external controller, and an extra-corporeal sensor; wherein said implantable unit comprises an implantable transceiver means for communicating with a similar external transceiver means in said external controller to provide a telemetry link between said controller and said implantable unit, a first reservoir means for holding medication liquid, a liquid dispensing device, a pump connected between said reservoir means and said liquid dispensing device, and a first electronic control circuit means connected to said implantable transceiver means and to said pump to operate said pump; wherein said external controller comprises a second electronic control circuit means connected with said external transceiver means, a transducer means for reading said sensor, said transducer means having an output connected to said second electronic control circuit means, and a manually operable electric input device connected to said second electronic control circuit means; wherein said pump is operable by said first electronic control circuit means to pump said medication liquid from said first reservoir means to said liquid-dispensing deive at a first predetermined rate independent of the output of said extra-corporeal sensor, and wherein said input device or said transducer means include means which selectively operable at intermittent times to respectively convey commands or output of said transducer representing the reading of said sensor to said second control circuit to instruct said first control circuit via said telemetry link to modify the operation of said pump.”

[0388] U.S. Pat. No. 4,941,461 describes an electrically actuated inflatable penile erecton device comprised of an implantable induction coil and an implantable pump; the entire disclosure of this United States patent is hereby incorporated by reference into this specification. The device of this patent is described, e.g., in claim 1 of the patent, which discloses “An apparatus for achieving a penile erection in a human male, comprising: at least one elastomer cylinder having a root chamber and a pendulous chamber, said elastomer cylinder adapted to be placed in the corpus carvenosum of the penis; an external magnetic field generator which can be placed over some section of the penis which generates an alternating magnetic field; an induction coil contained within said elastomer cylinder which produces an alternating electric current when in the proximity of said alternating magnetic filed which is produced by said external magnetic field generator; and a fluid pumping means located within said elastomer cylinder, said pumping means being operated by the electrical power generated in said induction coil to pump fluid from said root chamber to said pendulous chamber in order to stiffen said elastomer cylinder for causing the erect state of the penis.”

[0389] U.S. Pat. No. 5,487,760 discloses an implantable signal transceiver disposed in an artificial heart valve; this transceiver may be used in the process of this invention in accordance with the aforementioned telemetry device; and the entire disclosure of this United States patent is hereby incorporated by reference into this specification. Claim 1 of this patent describes: “In combination, an artificial heart valve of the type having a tubular body member, defining a lumen and pivotally supporting at least one occluder, said body member having a sewing cuff covering an exterior surface of said body member; and an electronic sensor module disposed between said sewing cuff and said exterior surface, wherein said sensor module incorporates a sensor element for detecting movement of said at least one occluder between an open and a closed disposition relative to said lumen and wherein said sensor module further includes a signal transceiver coupled to said sensor element, and means for energizing said signal transceiver, and wherein said sensor module includes means for encapsulating said sensor element, signal transceiver and energizing means in a moisture-impervious container.”

[0390] As will be apparent to those skilled in the art, the sensor/transceiver combination may advantageously be used in conjunction with the anti-mitotic compound of this invention, and/or microtubules.

[0391] U.S. Pat. No. 5,702,430 discloses an implantable power supply; the entire disclosure of such patent is hereby incorporated by reference into this specification. This implantable power supply may be used to supply power to either the compound of this invention, the treatment site, and/or one or more other devices from which a specified energy output is desired.

[0392] Claim 1 of U.S. Pat. No. 5,702,430 describes: “A surgically implantable power supply comprising battery means for providing a source of power, charging means for charging the battery means, enclosure means isolating the battery means from the human body, gas holding means within the enclosure means for holding gas generated by the battery means during charging, seal means in the enclosure means arranged to rapture when the internal gas pressure exceeds a certain value and inflatable gas container means outside the enclosure means to receive gas from within the enclosure means when the seal means has been ruptured.”

[0393] Columns 1 through 5 of U.S. Pat. No. 5,702,430 presents an excellent discussion of “prior art” implantable pump assemblies that may be used, e.g., to deliver the anti-mitotic compound of this invention. As is disclosed in such portion of U.S. Pat. No. 5,702,430, “The most widely tested and commonly used implantable blood pumps employ variable forms of flexible sacks (also spelled sacs) or diaphragms which are squeezed and released in a cyclical manner to cause pulsatile ejection of blood. Such pumps are discussed in books or articles such as Hogness and Antwerp 1991, DeVries et al 1984, and Farrar et al 1988, and in U.S. Pat. No. 4,994,078 (Jarvik 1991), U.S. Pat. No. 4,704,120 (Slonina 1987), U.S. Pat. No. 4,936,758 (Coble 1990), and U.S. Pat. No. 4,969,864 (Schwarzmann et al 1990). Sack or diaphragm pumps are subject to fatigue failure of compliant elements and as such are mechanically and functionally quite different from the pump which is the subject of the present invention.”

[0394] U.S. Pat. No. 5,702,430 also discloses that “An entirely different class of implantable blood pumps uses rotary pumping mechanisms. Most rotary pumps can be classified into two categories: centrifugal pumps and axial pumps. Centrifugal pumps, which include pumps marketed by Sarns (a subsidiary of the 3M Company) and Biomedicus (a subsidiary of Medtronic, Eden Prairie, Minn.), direct blood into a chamber, against a spinning interior wall (which is a smooth disk in the Medtronic pump). A flow channel is provided so that the centrifugal force exerted on the blood generates flow.”

[0395] U.S. Pat. No. 5,702,430 also discloses that “By contrast, axial pumps provide blood flow along a cylindrical axis, which is in a straight (or nearly straight) line with the direction of the inflow and outflow. Depending on the pumping mechanism used inside an axial pump, this can in some cases reduce the shearing effects of the rapid acceleration and deceleration forces generated in centrifugal pumps. However, the mechanisms used by axial pumps can inflict other types of stress and damage on blood cells.”

[0396] U.S. Pat. No. 5,702,430 also discloses that “Some types of axial rotary pumps use impeller blades mounted on a center axle, which is mounted inside a tubular conduit. As the blade assembly spins, it functions like a fan, or an outboard motor propeller. As used herein, “impeller” refers to angled vanes (also called blades) which are constrained inside a flow conduit; an impeller imparts force to a fluid that flows through the conduit which encloses the impeller. By contrast, “propeller” usually refers to non-enclosed devices, which typically are used to propel vehicles such as boats or airplanes.”

[0397] “Another type of axial blood pump, called the “Haemopump” (sold by Nimbus) uses a screw-type impeller with a classic screw (also called an Archimedes screw; also called a helifoil, due to its helical shape and thin cross-section). Instead of using several relatively small vanes, the Haemopump screw-type impeller contains a single elongated helix, comparable to an auger used for drilling or digging holes. In screw-type axial pumps, the screw spins at very high speed (up to about 10,000 rpm). The entire Haemopump unit is usually less than a centimeter in diameter. The pump can be passed through a peripheral artery into the aorta, through the aortic valve, and into the left ventricle. It is powered by an external motor and drive unit.”

[0398] U.S. Pat. No. 5,702,430 also discloses that “Centrifugal or axial pumps are commonly used in three situations: (1) for brief support during cardio-pulmonary operations, (2) for short-term support while awaiting recovery of the heart from surgery, or (3) as a bridge to keep a patient alive while awaiting heart transplantation. However, rotary pumps generally are not well tolerated for any prolonged period. Patients who must rely on these units for a substantial length of time often suffer from strokes, renal (kidney) failure, and other organ dysfunction. This is due to the fact that rotary devices, which must operate at relatively high speeds, may impose unacceptably high levels of turbulent and laminar shear forces on blood cells. These forces can damage or lyse (break apart) red blood cells. A low blood count (anemia) may result, and the disgorged contents of lysed blood cells (which include large quantities of hemoglobin) can cause renal failure and lead to platelet activation that can cause embolisms and stroke.”

[0399] “One of the most important problems in axial rotary pumps in the prior art involves the gaps that exist between the outer edges of the blades, and the walls of the flow conduit. These gaps are the site of severe turbulence and shear stresses, due to two factors. Since implantable axial pumps operate at very high speed, the outer edges of the blades move extremely fast and generate high levels of shear and turbulence. In addition, the gap between the blades and the wall is usually kept as small as possible to increase pumping efficiency and to reduce the number of cells that become entrained in the gap area. This can lead to high-speed compression of blood cells as they are caught in a narrow gap between the stationary interior wall of the conduit and the rapidly moving tips or edges of the blades.”

[0400] U.S. Pat. No. 5,702,430 also discloses that “An important factor that needs to be considered in the design and use of implantable blood pumps is “residual cardiac function,” which is present in the overwhelming majority of patients who would be candidates for mechanical circulatory assistance. The patient's heart is still present and still beating, even though, in patients who need mechanical pumping assistance, its output is not adequate for the patient's needs. In many patients, residual cardiac functioning often approaches the level of adequacy required to support the body, as evidenced by the fact that the patient is still alive when implantation of an artificial pump must be considered and decided. If cardiac function drops to a level of severe inadequacy, death quickly becomes imminent, and the need for immediate intervention to avert death becomes acute.’”

[0401] U.S. Pat. No. 5,702,430 also discloses that “Most conventional ventricular assist devices are designed to assume complete circulatory responsibilities for the ventricle they are “assisting. As such, there is no need, nor presumably any advantage, for the device to interact in harmony with the assisted ventricle. Typically, these devices utilize a “fill-to-empty” mode that, for the most part, results in emptying of the device in random association with native heart contraction. This type of interaction between the device and assisted ventricle ignores the fact that the overwhelming majority of patients who would be candidates for mechanical assistance have at least some significant residual cardiac function.”

[0402] U.S. Pat. No. 5,702,430 also discloses that “It is preferable to allow the natural heart, no matter how badly damaged or diseased it may be, to continue contributing to the required cardiac output whenever possible so that ventricular hemodynamics are disturbed as little as possible. This points away from the use of total cardiac replacements and suggests the use of “assist” devices whenever possible. However, the use of assist devices also poses a very difficult problem: in patients suffering from severe heart disease, temporary or intermittent crises often require artificial pumps to provide “bridging” support which is sufficient to entirely replace ventricular pumping capacity for limited periods of time, such as in the hours or days following a heart attack or cardiac arrest, or during periods of severe tachycardia or fibrillation.”

[0403] U.S. Pat. No. 5,702,430 also discloses that “Accordingly, an important goal during development of the described method of pump implantation and use and of the surgically implantable reciprocating pump was to design a method and a device which could cover a wide spectrum of requirements by providing two different and distinct functions. First, an ideal cardiac pumping device should be able to provide “total” or “complete” pumping support which can keep the patient alive for brief or even prolonged periods, if the patient's heart suffers from a period of total failure or severe inadequacy. Second, in addition to being able to provide total pumping support for the body during brief periods, the pump should also be able to provide a limited “assist” function. It should be able to interact with a beating heart in a cooperative manner, with minimal disruption of the blood flow generated by the natural heartbeat. If a ventricle is still functional and able to contribute to cardiac output, as is the case in the overwhelming majority of clinical applications, then the pump will assist or augment the residual cardiac output. This allows it to take advantage of the natural, non-hemolytic pumping action of the heart to the fullest extent possible; it minimizes red blood cell lysis, it reduces mechanical stress on the pump, and it allows longer pump life and longer battery life.”

[0404] “Several types of surgically implantable blood pumps containing a piston-like member have been developed to provide a mechanical device for augmenting or even totally replacing the blood pumping action of a damaged or diseased mammalian heart.”

[0405] “U.S. Pat. No. 3,842,440 to Karlson discloses an implantable linear motor prosthetic heart and control system containing a pump having a piston-like member which is reciprocal within a magnetic field. The piston-like member includes a compressible chamber in the prosthetic heart which communicates with the vein or aorta.”

[0406] U.S. Pat. No. 5,702,430 also discloses that “U.S. Pat. Nos. 3,911,897 and 3,911,898 to Leachman, Jr. disclose heart assist devices controlled in the normal mode of operation to copulsate and counterpulsate with the heart, respectively, and produce a blood flow waveform corresponding to the blood flow waveform of the heart being assisted. The heart assist device is a pump connected serially between the discharge of a heart ventricle and the vascular system. The pump may be connected to the aorta between the left ventricle discharge immediately adjacent the aortic valve and a ligation in the aorta a short distance from the discharge. This pump has coaxially aligned cylindrical inlet and discharge pumping chambers of the same diameter and a reciprocating piston in one chamber fixedly connected with a reciprocating piston of the other chamber. The piston pump further includes a passageway leading between the inlet and discharge chambers and a check valve in the passageway preventing flow from the discharge chamber into the inlet chamber. There is no flow through the movable element of the piston.”

[0407] U.S. Pat. No. 5,702,430 also discloses that “U.S. Pat. No. 4,102,610 to Taboada et al. discloses a magnetically operated constant volume reciprocating pump which can be used as a surgically implantable heart pump or assist. The reciprocating member is a piston carrying a tilting-disk type check valve positioned in a cylinder. While a tilting disk valve results in less turbulence and applied shear to surrounding fluid than a squeezed flexible sack or rotating impeller, the shear applied may still be sufficiently excessive so as to cause damage to red blood cells.”

[0408] U.S. Pat. No. 5,702,430 also discloses that “U.S. Pat. Nos. 4,210,409 and 4,375,941 to Child disclose a pump used to assist pumping action of the heart having a piston movable in a cylindrical casing in response to magnetic forces. A tilting-disk type check valve carried by the piston provides for flow of fluid into the cylindrical casing and restricts reverse flow. A plurality of longitudinal vanes integral with the inner wall of the cylindrical casing allow for limited reverse movement of blood around the piston which may result in compression and additional shearing of red blood cells. A second fixed valve is present in the inlet of the valve to prevent reversal of flow during piston reversal.”

[0409] U.S. Pat. No. 5,702,430 also discloses that “U.S. Pat. No. 4,965,864 to Roth discloses a linear motor using multiple coils and a reciprocating element containing permanent magnets which is driven by microprocessor-controlled power semiconductors. A plurality of permanent magnets is mounted on the reciprocating member. This design does not provide for self-synchronization of the linear motor in the event the stroke of the linear motor is greater than twice the pole pitch on the reciprocating element. During start-up of the motor, or if magnetic coupling is lost, the reciprocating element may slip from its synchronous position by any multiple of two times the pole pitch. As a result, a sensing arrangement must be included in the design to detect the position of the piston so that the controller will not drive it into one end of the closed cylinder. In addition, this design having equal pole pitch and slot pitch results in a “jumpy” motion of the reciprocating element along its stroke.”

[0410] U.S. Pat. No. 5,702,430 also discloses that “In addition to the piston position sensing arrangement discussed above, the Roth design may also include a temperature sensor and a pressure sensor as well as control circuitry responsive to the sensors to produce the intended piston motion. For applications such as implantable blood pumps where replacement of failed or malfunctioning sensors requires open heart surgery, it is unacceptable to have a linear motor drive and controller that relies on any such sensors. In addition, the Roth controller circuit uses only NPN transistors thereby restricting current flow to the motor windings to one direction only.’

[0411] ‘U.S. Pat. No. 4,541,787 to Delong describes a pump configuration wherein a piston containing a permanent magnet is driven in a reciprocating fashion along the length of a cylinder by energizing a sequence of coils positioned around the outside of the cylinder. However, the coil and control system configurations disclosed only allow current to flow through one individual winding at a time. This does not make effective use of the magnetic flux produced by each pole of the magnet in the piston. To maximize force applied to the piston in a given direction, current must flow in one direction in the coils surrounding the vicinity of the north pole of the permanent magnet while current flows in the opposite direction in the coils surrounding the vicinity of the south pole of the permanent magnet. Further, during starting of the pump disclosed by Delong, if the magnetic piston is not in the vicinity of the first coil energized, the sequence of coils that are subsequently energized will ultimately approach and repel the magnetic piston toward one end of the closed cylinder. Consequently, the piston must be driven into the end of the closed cylinder before the magnetic poles created by the external coils can become coupled with the poles of the magnetic piston in attraction.”

[0412] U.S. Pat. No. 5,702,430 also discloses that “U.S. Pat. No. 4,610,658 to Buchwald et al. discloses an implantable fluid displacement peritoneovenous shunt system. The system comprises a magnetically driven pump having a spool piston fitted with a disc flap valve.”

[0413] U.S. Pat. No. 5,702,430 also discloses that “U.S. Pat. No. 5,089,017 to Young et al. discloses a drive system for artificial hearts and left ventricular assist devices comprising one or more implantable pumps driven by external electromagnets. The pump utilizes working fluid, such as sulfur hexafluoride to apply pneumatic pressure to increase blood pressure and flow rate.”

[0414] U.S. Pat. No. 5,743,854 discloses a device for inducing and localizing epileptiform activity that is comprised of a direct current (DC) magnetic field generator, a DC power source, and sensors adapted to be coupled to a patient's head; this direct current magnetic field generator may be used in conjunction with the anti-mitotic compound of this invention and/or an auxiliary device and/or tubulin and/or microtubules. In one embodiment of the invention, described in claim 7, the sensors “ . . . comprise Foramen Ovale electrodes adapted to be implanted to sense evoked and natural epileptic firings.”

[0415] U.S. Pat. No. 5,803,897 discloses a penile prosthesis system comprised of an implantable pressurized chamber, a reservoir, a rotary pump, a magnetically responsive rotor, and a rotary magnetic field generator. Claim 1 of this patent describes: “A penile prosthesis system comprising: at least one pressurizable chamber including a fluid port, said chamber adapted to be located within the penis of a patient for tending to make the penis rigid in response to fluid pressure within said chamber; a fluid reservoir; a rotary pump adapted to be implanted within the body of a user, said rotary pump being coupled to said reservoir and to said chamber, said rotary pump including a magnetically responsive rotor adapted for rotation in the presence of a rotating magnetic field, and an impeller for tending to pump fluid at least from said reservoir to said chamber under the impetus of fluid pressure, to thereby pressurize said chamber in response to operation of said pump; and a rotary magnetic field generator for generating a rotating magnetic field, for, when placed adjacent to the skin of said user at a location near said rotary pump, rotating said magnetically responsive rotor in response to said rotating magnetic field, to thereby tend to pressurize said chamber and to render the penis rigid; controllable valve means operable in response to motion of said rotor of said rotary pump, for tending to prevent depressurization of said chamber when said rotating magnetic field no longer acts on said rotor, said controllable valve means comprising a unidirectional check valve located in the fluid path extending between said rotary pump and said port of said chamber.” Such fluid pumping means may be used to facilitate the delivery of the anti-mitotic compound of this invention.

[0416] U.S. Pat. No. 5,810,015 describes an implantable power supply that can convert non-electrical energy (such as mechanical, chemical, thermal, or nuclear energy) into electrical energy; the entire disclosure of this United States patent is hereby incorporated by reference into this specification. This power supply may be used to supply energy to the anti-mitotic compound of this invention and/or to tubulin and/or to microtubules.

[0417] In column 1 of U.S. Pat. No. 5,810,015, a discussion of “prior art” rechargeable power supplies is presented. It is disclosed in this column 1 that: “Modern medical science employs numerous electrically powered devices which are implanted in a living body. For example, such devices may be employed to deliver medications, to support blood circulation as in a cardiac pacemaker or artificial heart, and the like. Many implantable devices contain batteries which may be rechargeable by transcutaneous induction of electromagnetic fields in implanted coils connected to the batteries. Transcutaneous inductive recharging of batteries in implanted devices is disclosed for example in U.S. Pat. Nos. 3,923,060; 4,082,097; 4,143,661; 4,665,896; 5,279,292; 5,314,453; 5,372,605, and many others.”

[0418] U.S. Pat. No. 5,810,015 also discloses that: “Other methods for recharging implanted batteries have also been attempted. For example, U.S. Pat. No. 4,432,363 discloses use of light or heat to power a solar battery within an implanted device. U.S. Pat. No. 4,661,107 discloses recharging of a pacemaker battery using mechanical energy created by motion of an implanted heart valve.” These “other methods” may also be used in the process of this invention.

[0419] U.S. Pat. No. 5,810,015 also discloses that: “A number of implanted devices have been powered without batteries. U.S. Pat. Nos. 3,486,506 and 3,554,199 disclose generation of electric pulses in an implanted device by movement of a rotor in response to the patient's heartbeat. U.S. Pat. No. 3,563,245 discloses a miniaturized power supply unit which employs mechanical energy of heart muscle contractions to generate electrical energy for a pacemaker. U.S. Pat. No. 3,456,134 discloses a piezoelectric converter for electronic implants in which a piezoelectric crystal is in the form of a weighted cantilever beam capable of responding to body movement to generate electric pulses. U.S. Pat. No. 3,659,615 also discloses a piezoelectric converter which reacts to muscular movement in the area of implantation. U.S. Pat. No. 4,453,537 discloses a pressure actuated artificial heart powered by a second implanted device attached to a body muscle which in turn is stimulated by an electric signal generated by a pacemaker.” These “other devices” may also be used in the process of this invention.

[0420] U.S. Pat. No. 5,810,015 also discloses that: “In spite of all these efforts, a need remains for efficient generation of energy to supply electrically powered implanted devices.” The solution provided by U.S. Pat. No. 5,80,015 is described in claim 1 thereof, which describes: “An implantable power supply apparatus for supplying electrical energy to an electrically powered device, comprising: a power supply unit including: a transcutaneously, invasively rechargeable non-electrical energy storage device (NESD); an electrical energy storage device (EESD); and an energy converter coupling said NESD and said EESD, said converter including means for converting non-electrical energy stored in said NESD to electrical energy and for transferring said electrical energy to said EESD, thereby storing said electrical energy in said EESD.”

[0421] An implantable ultrasound communicaton system is disclosed in U.S. Pat. No. 5,861,018, the entire disclosure of which is hereby incorporated by reference into this specification. As is disclosed in the abstract of this patent, there is disclosed in such patent “A system for communicating through the skin of a patient, the system including an internal communication device implanted inside the body of a patient and an external communication device. The external communication device includes an external transmitter which transmits a carrier signal into the body of the patient during communication from the internal communication device to the external communication device. The internal communication device includes an internal modulator which modulates the carrier signal with information by selectively reflecting the carrier signal or not reflecting the carrier signal. The external communication device demodulates the carrier signal by detecting when the carrier signal is reflected and when the carrier signal is not reflected through the skin of the patient. When the reflected carrier signal is detected, it is interpreted as data of a first state, and when the reelected carrier signal is not detected, it is interpreted as data of a second state. Accordingly, the internal communication device consumes relatively little power because the carrier signal used to carry the information is derived from the external communication device. Further, transfer of data is also very efficient because the period needed to modulate information of either the first state or the second state onto the carrier signal is the same. In one embodiment, the carrier signal operates in the ultrasound frequency range.”

[0422] U.S. Pat. No. 5,861,019, the entire disclosure of which is hereby incorporated by reference into this specification, discloses a telemetry system for communications between an external programmer and an implantable medical device. Claim 1 of this patent describes: “A telemetry system for communications between an external programmer and an implantable medical device, comprising:the external programmer comprising an external telemetry antenna and an external transceiver for receiving uplink telemetry transmissions and transmitting downlink telemetry transmission through the external telemetry antenna; the implantable medical device comprising an implantable medical device housing, an implantable telemetry antenna and an implantable transceiver for receiving downlink transmissions and for transmitting uplink telemetry transmission through the implantable telemetry antenna, the implantable medical device housing being formed of a conductive metal and having an exterior housing surface and an interior housing surface; the implantable medical device housing being formed with a housing recess extending inwardly from the exterior housing surface to a predetermined housing recess depth in the predetermined substrate area of the exterior housing surface for receiving the dielectric substrate therein; wherein the implantable telemetry antenna is a conformal microstrip antenna formed as part of the implantable medical device housing, the microstrip antenna having electrically conductive ground plane and radiator patch layers separated by a dielectric substrate, layer the conductive radiator patch layer having a predetermined thickness and predetermined radiator patch layer dimensions, the patch layer being formed upon one side of the dielectric substrate layer.”

[0423] “An extensive description of the historical development of uplink and downlink telemetry transmission formats” is set forth at columns 2 through 5 of U.S. Pat. No. 5,861,019; such telemetry transmission formats may be used in conjunction with the anti-mitotic compound of this invention. As is disclosed in these columns: “An extensive description of the historical development of uplink and downlink telemetry transmission formats and is set forth in the above-referenced '851 and '963 applications and in the following series of commonly assigned patents all of which are incorporated herein by reference in their entireties. Commonly assigned U.S. Pat. No. 5,127,404 to Grevious et al. sets forth an improved method of frame based, pulse position modulated (PPM) of data particularly for uplink telemetry. The frame-based PPM telemetry format increases bandwidth well above simple PIM or pulse width modulation (PWM) binary bit stream transmissions and thereby conserves energy of the implanted medical device. Commonly assigned U.S. Pat. No. 5,168,871 to Grevious et al. sets forth an improvement in the telemetry system of the '404 patent for detecting uplink telemetry RF pulse bursts that are corrupted in a noisy environment. Commonly assigned U.S. Pat. No. 5,292,343 to Blanchette et al. sets forth a further improvement in the telemetry system of the '404 patent employing a hand shake protocol for maintaining the communications link between the external programmer and the implanted medical device despite instability in holding the programmer RF head steady during the transmission. Commonly assigned U.S. Pat. No. 5,324,315 to Grevious sets forth an improvement in the uplink telemetry system of the '404 patent for providing feedback to the programmer to aid in optimally positioning the programmer RF head over the implanted medical device. Commonly assigned U.S. Pat. No. 5,117,825 to Grevious sets forth a further improvement in the programmer RF head for regulating the output level of the magnetic H field of the RF head telemetry antenna using a signal induced in a sense coil in a feedback loop to control gain of an amplifier driving the RF head telemetry antenna. Commonly assigned U.S. Pat. No. 5,562,714 to Grevious sets forth a further solution to the regulation of the output level of the magnetic H field generated by the RF head telemetry antenna using the sense coil current to directly load the H field. Commonly assigned U.S. Pat. No. 5,354,319 to Wybomey et al. sets forth a number of further improvements in the frame based telemetry system of the '404 patent. Many of these improvements are incorporated into MEDTRONIC® Model 9760, 9766 and 9790 programmers. These improvements and the improvements described in the above-referenced pending patent applications are directed in general to increasing the data transmission rate, decreasing current consumption of the battery power source of the implantable medical device, and increasing reliability of uplink and downlink telemetry transmissions.”

[0424] U.S. Pat. No. 5,810,015 also discloses that: “The current MEDTRONIC® telemetry system employing the 175 kHz carrier frequency limits the upper data transfer rate, depending on bandwidth and the prevailing signal-to-noise ratio. Using a ferrite core, wire coil, RF telemetry antenna results in: (1) a very low radiation efficiency because of feed impedance mismatch and ohmic losses; 2) a radiation intensity attenuated proportionally to at least the fourth power of distance (in contrast to other radiation systems which have radiation intensity attenuated proportionally to square of distance); and 3) good noise immunity because of the required close distance between and coupling of the receiver and transmitter RF telemetry antenna fields.”

[0425] U.S. Pat. No. 5,810,015 also discloses that “These characteristics require that the implantable medical device be implanted just under the patient's skin and preferably oriented with the RF telemetry antenna closest to the patient's skin. To ensure that the data transfer is reliable, it is necessary for the patient to remain still and for the medical professional to steadily hold the RF programmer head against the patient's skin over the implanted medical device for the duration of the transmission. If the telemetry transmission takes a relatively long number of seconds, there is a chance that the programmer head will not be held steady. If the uplink telemetry transmission link is interrupted by a gross movement, it is necessary to restart and repeat the uplink telemetry transmission. Many of the above-incorporated, commonly assigned, patents address these problems.”

[0426] U.S. Pat. No. 5,810,015 also discloses that “The ferrite core, wire coil, RF telemetry antenna is not bio-compatible, and therefore it must be placed inside the medical device hermetically sealed housing. The typically conductive medical device housing adversely attenuates the radiated RF field and limits the data transfer distance between the programmer head and the implanted medical device RF telemetry antennas to a few inches.”

[0427] U.S. Pat. No. 5,810,015 also discloses that “In U.S. Pat. No. 4,785,827 to Fischer, U.S. Pat. No. 4,991,582 to Byers et al., and commonly assigned U.S. Pat. No. 5,470,345 to Hassler et al. (all incorporated herein by reference in their entireties), the metal can typically used as the hermetically sealed housing of the implantable medical device is replaced by a hermetically sealed ceramic container. The wire coil antenna is still placed inside the container, but the magnetic H field is less attenuated. It is still necessary to maintain the implanted medical device and the external programming head in relatively close proximity to ensure that the H field coupling is maintained between the respective RF telemetry antennas.”

[0428] U.S. Pat. No. 5,810,015 also discloses that: “Attempts have been made to replace the ferrite core, wire coil, RF telemetry antenna in the implantable medical device with an antenna that can be located outside the hermetically sealed enclosure. For example, a relatively large air core RF telemetry antenna has been embedded into the thermoplastic header material of the MEDTRONIC® Prometheus programmable IPG. It is also suggested that the RF telemetry antenna may be located in the IPG header in U.S. Pat. No. 5,342,408. The header area and volume is relatively limited, and body fluid may infiltrate the header material and the RF telemetry antenna.”

[0429] U.S. Pat. No. 5,810,015 also discloses that: “In U.S. Pat. Nos. 5,058,581 and 5,562,713 to Silvian, incorporated herein by reference in their entireties, it is proposed that the elongated wire conductor of one or more medical lead extending away from the implanted medical device be employed as an RF telemetry antenna. In the particular examples, the medical lead is a cardiac lead particularly used to deliver energy to the heart generated by a pulse generator circuit and to conduct electrical heart signals to a sense amplifier. A modest increase in the data transmission rate to about 8 Kb/s is alleged in the '581 and '713 patents using an RF frequency of 10-300 MHz. In these cases, the conductor wire of the medical lead can operate as a far field radiator to a more remotely located programmer RF telemetry antenna. Consequently, it is not necessary to maintain a close spacing between the programmer RF telemetry antenna and the implanted cardiac lead antenna or for the patient to stay as still as possible during the telemetry transmission.”

[0430] U.S. Pat. No. 5,810,015 also discloses that: “However, using the medical lead conductor as the RF telemetry antenna has several disadvantages. The radiating field is maintained by current flowing in the lead conductor, and the use of the medical lead conductor during the RF telemetry transmission may conflict with sensing and stimulation operations. RF radiation losses are high because the human body medium is lossy at higher RF frequencies. The elongated lead wire RF telemetry antenna has directional radiation nulls that depend on the direction that the medical lead extends, which varies from patient to patient. These considerations both contribute to the requirement that uplink telemetry transmission energy be set artificially high to ensure that the radiated RF energy during the RF uplink telemetry can be detected at the programmer RF telemetry antenna. Moreover, not all implantable medical devices have lead conductor wires extending from the device.”

[0431] U.S. Pat. No. 5,810,015 also discloses that: “A further U.S. Pat. No. 4,681,111 to Silvian, incorporated herein by reference in its entirety, suggests the use of a stub antenna associated with the header as the implantable medical device RF telemetry antenna for high carrier frequencies of up to 200 MHz and employing phase shift keying (PSK) modulation. The elimination of the need for a VCO and a bit rate on the order of 2-5% of the carrier frequency or 3.3-10 times the conventional bit rate are alleged.”

[0432] U.S. Pat. No. 5,810,015 also discloses that: “At present, a wide variety of implanted medical devices are commercially released or proposed for clinical implantation. Such medical devices include implantable cardiac pacemakers as well as implantable cardioverter-defibrillators, pacemaker-cardioverter-defibrillators, drug delivery pumps, cardiomyostimulators, cardiac and other physiologic monitors, nerve and muscle stimulators, deep brain stimulators, cochlear implants, artificial hearts, etc. As the technology advances, implantable medical devices become ever more complex in possible programmable operating modes, menus of available operating parameters, and capabilities of monitoring increasing varieties of physiologic conditions and electrical signals which place ever increasing demands on the programming system.”

[0433] U.S. Pat. No. 5,810,015 also discloses that: “It remains desirable to minimize the time spent in uplink telemetry and downlink transmissions both to reduce the likelihood that the telemetry link may be broken and to reduce current consumption.”

[0434] “Moreover, it is desirable to eliminate the need to hold the programmer RF telemetry antenna still and in proximity with the implantable medical device RF telemetry antenna for the duration of the telemetry transmission. As will become apparent from the following, the present invention satisfies these needs.”

[0435] The solution to this problem is presented, e.g., in claim 1 of U.S. Pat. No. 5,861,019. This claim describes “A telemetry system for communications between an external programmer and an implantable medical device, comprising:the external programmer comprising an external telemetry antenna and an external transceiver for receiving uplink telemetry transmissions and transmitting downlink telemetry transmission through the external telemetry antenna; the implantable medical device comprising an implantable medical device housing, an implantable telemetry antenna and an implantable transceiver for receiving downlink transmissions and for transmitting uplink telemetry transmission through the implantable telemetry antenna, the implantable medical device housing being formed of a conductive metal and having an exterior housing surface and an interior housing surface; the implantable medical device housing being formed with a housing recess extending inwardly from the exterior housing surface to a predetermined housing recess depth in the predetermined substrate area of the exterior housing surface for receiving the dielectric substrate therein; wherein the implantable telemetry antenna is a conformal microstrip antenna formed as part of the implantable medical device housing, the microstrip antenna having electrically conductive ground plane and radiator patch layers separated by a dielectric substrate, layer the conductive radiator patch layer having a predetermined thickness and predetermined radiator patch layer dimensions, the patch layer being formed upon one side of the dielectric substrate layer.”

[0436] U.S. Pat. No. 5,945,762, the entire disclosure of which is hereby incorporated by reference into this specification, discloses an external transmitter adapted to magnetically excite an implanted receiver coil; such an implanted receiver coil may be disposed near, e.g., the anti-mitotic compound of this invention and/or other devices and/or tubulin and/or microtubules. Claim 1 of this patent describes “An external transmitter adapted for magnetically exciting an implanted receiver coil, causing an electrical current to flow in the implanted receiver coil, comprising: (a) a support; (b) a magnetic field generator that is mounted to the support; and (c) a prime mover that is drivingly coupled to an element of the magnetic field generator to cause said element of the magnetic field generator to reciprocate, in a reciprocal motion, said reciprocal motion of said element of the magnetic field generator producing a varying magnetic field that is adapted to induce an electrical current to flow in the implanted receiver coil.”

[0437] U.S. Pat. No. 5,954,758, the entire disclosure of which is hereby incorporated by reference into this specification, claims an implantable electrical stimulator comprised of an implantable radio frequency receiving coil, an implantable power supply, an implantable input signal generator, an implantable decoder, and an implantable electrical stimulator. Claim 1 of this patent describes “A system for transcutaneously telemetering position signals out of a human body and for controlling a functional electrical stimulator implanted in said human body, said system comprising: an implantable radio frequency receiving coil for receiving a transcutaneous radio frequency signal; an implantable power supply connected to said radio frequency receiving coil, said power supply converting received transcutaneous radio frequency signals into electromotive power; an implantable input signal generator electrically powered by said implantable power supply for generating at least one analog input movement signal to indicate voluntary bodily movement along an axis; an implantable encoder having an input operatively connected with said implantable input signal generator for encoding said movement signal into output data in a preselected data format; an impedance altering means connected with said encoder and said implantable radio frequency signal receiving coil to selectively change an impedance of said implantable radio frequency signal receiving coil; an external radio frequency signal transmit coil inductively coupled with said implantable radio frequency signal receiving coil, such that impedance changes in said implantable radio frequency signal receiving coil are sensed by said external radio frequency signal transmit coil to establish a sensed modulated movement signal in said external transmit coil; an external control system electrically connected to said external radio frequency transmit coil for monitoring said sensed modulated movement signal in said external radio frequency transmit coil, said external control system including: a demodulator for recovering the output data of said encoder from the sensed modulated ovement signal of said external transmit coil, a pulse width algorithm means for applying a preselected pulse width algorithm to the recovered output data to derive a first pulse width, an amplitude algorithm means for applying an amplitude algorithm to the recovered output data to derive a first amplitude therefrom, an interpulse interval algorithm means for applying an interpulse algorithm to the recovered output data to derive a first interpulse interval therefrom; and, a stimulation pulse train signal generator for generating a stimulus pulse train signal which has the first pulse width and the first pulse amplitude; an implantable functional electrical stimulator for receiving said stimulation pulse train signal from said stimulation pulse train signal generator and generating stimulation pulses with the first pulse width, the first pulse amplitude, and separated by the first interpulse interval; and, at least one electrode operatively connected with the functional electrical stimulator for applying said stimulation pulses to muscle tissue of said human body.”

[0438] U.S. Pat. No. 6,006,133, the entire disclosure of which is hereby incorporated by reference into this specification, describes an implantable medical device comprised of a hermetically sealed housing.” Such a hermetically sealed housing may be used to contain, e.g., the anti-mitotic compound of this invention.

[0439] U.S. Pat. No. 6,083,166, the entire disclosure of which is hereby incorporated by reference into this specification, discloses an ultrasound transmitter for use with a surgical device. This ultrasound transmitter may be used, e.g., to affect the anti-mitotic compound of this invention and/or tubulin and/or microtubules.

[0440] U.S. Pat. No. 6,152,882, the entire disclosure of which is hereby incorporated by reference into this specification, discloses an implantable electroporation unit, an implantable proble electrode, an implantable reference electrode, and an an amplifier unit; this electroporation unit may be used to treat, e.g., cancer cells in conjunction with the anti-mitotic compound of this invention. Claim 35 of this patent describes: “Apparatus for measurement of monophasic action potentials from an excitable tissue including a plurality of cells, the apparatus comprising: at least one probe electrode placeable adjacent to or in contact with a portion of said excitable tissue; at least one reference electrode placeable proximate said at least one probe electrode; an electroporating unit electrically connected to said at least one probe electrode and said at least one reference electrode for controllably applying to at least some of said cells subjacent said at least one probe electrode electrical current pulses suitable for causing electroporation of cell membranes of said at least some of said cells; and an amplifier unit electrically connected to said at least one probe electrode and to said at least one reference electrode for providing an output signal representing the potential difference between said probe electrode and said reference electrode”

[0441] U.S. Pat. No. 6,169,925, the entire disclosure of which is hereby incorporated by reference into this specification, describes a transceiver for use in communication with an implantable medical device. Claim 1 of this patent describes: “An external device for use in communication with an implantable medical device, comprising: a device controller; a housing; an antenna array mounted to the housing; an RF transceiver operating at defined frequency, coupled to the antenna array; means for encoding signals to be transmitted to the implantable device, coupled to an input of the transceiver; means for decoding signals received from the implantable device, coupled to an output of the transceiver; and means for displaying the decoded signals received from the implantable device; wherein the antenna array comprises two antennas spaced a fraction of the wavelength of the defined frequency from one another, each antenna comprising two antenna elements mounted to the housing and located orthogonal to one another; and wherein the device controller includes means for selecting which of the two antennas is coupled to the transceiver.” Such a transceiver, in combination with an implantable sensor, may be used in conjunction with the anti-mitotic compound of this invention and/or tubulin and/or microtubules and/or one or more other implanted devices.

[0442] U.S. Pat. No. 6,185,452, the entire disclosure of which is hereby incorporated by reference into this specification, claims a device for stimulating internal tissue, wherein such device is comprised of: “a sealed elongate housing configured for implantation in said patient's body, said housing having an axial dimension of less than 60 mm and a lateral dimension of less than 6 mm; power consuming circuitry carried by said housing including at least one electrode extending externally of said housing, said power consuming circuitry including a capacitor and pulse control circuitry for controlling (1) the charging of said capacitor and (2) the discharging of said capacitor to produce a current pulse through said electrode; a battery disposed in said housing electrically connected to said power consuming circuitry for powering said pulse control circuitry and charging said capacitor, said battery having a capacity of at least one microwatt-hour; an internal coil and a charging circuit disposed in said housing for supplying a charging current to said battery; an external coil adapted to be mounted outside of said patient's body; and means for energizing said external coil to generate an alternating magnetic field for supplying energy to said charging circuit via said internal coil.” Such capacitative discharge energy may be used to affect either the anti-mitotic compound of this invention and/or tubulin and/or microtubules.

[0443] U.S. Pat. No. 6,235,024, the entire disclosure of which is hereby incorporated by reference into this specification, discloses an implantable high frequency energy generator; such high-frequency energy may be used to affect either the anti-mitotic compound of this invention, tubulin, microtubules, and/or one or more other implanted devices. Claim 1 of this patent describes: “A catheter system comprising: an elongate catheter tubing having a distal section, a distal end, a proximal end, and at least one lumen extending between the distal end and the proximal end; a handle attached to the proximal end of said elongate catheter tubing, wherein the handle has a cavity; an ablation element mounted at the distal section of the elongate catheter tubing, the ablation element having a wall with an outer surface and an inner surface, wherein the outer surface is covered with an outer member made of a first electrically conductive material and the inner surface is covered with an inner member made of a second electrically conductive material, and wherein the wall comprises an ultrasound transducer; an electrical conducting means having a first and a second electrical wires, wherein the first electrical wire is coupled to the outer member and the second electrical wire is coupled to the inner member of the ablation element; and a high frequency energy generator means for providing a radiofrequency energy to the ablation element through a first electrical wire of the electrical conducting means.”

[0444] An implantable light-generating apparatus is described in claim 16 of U.S. Pat. No. 6,363,279, the entire disclosure of which is hereby incorporated by reference into this specification. In one embodiment, the compound of this invention is comprised of a photolytic linker which is caused to disassociate upon being exposed to specified light energy. As is disclosed in such claim 16, this patent provides a “Heart control apparatus, comprising circuitry for generating a non-excitatory stimulus, and stimulus application devices for applying to a heart or to a portion thereof said non-excitatory stimulus, wherein the circuitry for generating a non-excitatory stimulus generates a stimulus which is unable to generate a propagating action potential and wherein said circuitry comprises a light-generating apparatus for generating light.”

[0445] An implantable ultrasound probe is described in claim 1 of U.S. Pat. No. 6,421,565, the entire disclosure of which is hereby incorporated by reference into this specification. Such ultrasound may be used, e.g., to treat the microtubules of cancer cells; and this treatment may be combined, e.g., with the anti-mitotic compounds of this invention.

[0446] Claim 1 of U.S. Pat. No. 6,421,565 describes: “An implantable cardiac monitoring device comprising: an A-mode ultrasound probe adapted for implantation in a right ventricle of a heart, said ultrasound probe emitting an ultrasound signal and receiving at least one echo of said ultrasound signal from at least one cardiac segment of the left ventricle; a unit connected to said ultrasound probe for identifying a time difference between emission of said ultrasound signal and reception of said echo and, from said time difference, determining a position of said cardiac segment, said cardiac segment having a position which, at least when reflecting said ultrasound signal, is correlated to cardiac performance, and said unit deriving an indication of said cardiac performance from said position of said cardiac segment.”

[0447] An implantable stent that contains a tube and several optical emitters located on the inner surface of the tube is disclosed in U.S. Pat. No. 6,488,704, the entire disclosure of which is hereby incorporated by reference into this specification. One may use one or more of the implantable devices described in U.S. Pat. No. 6,488,704 together with the anti-mitotic compound of this invention and/or tubulin and/or microtubules and/or another in vivo device.

[0448] Claim 1 of U.S. Pat. No. 6,488,704 describes “1. An implantable stent which comprises: (a) a tube comprising an inner surface and an outer surface, and (b) a multiplicity of optical radiation emitting means adapted to emit radiation with a wavelength from about 30 nanometers to about 30 millimeters, and a multiplicity of optical radiation detecting means adapted to detect radiation with a wavelength of from about 30 nanometers to about 30 millimeters, wherein said optical radiation emitting means and said optical radiation detecting means are disposed on the inside surface of said tube.”

[0449] Many other implantable devices and configurations are described in the claims of U.S. Pat. No. 6,488,704. These devices and configurations may be used in conjunction with the anti-mitotic compound of this invention, and/or tubulin, and/or microtubules, and/or other auxiliary, implanted deivce.

[0450] Thus, e.g., claim 2 of U.S. Pat. No. 6,488,704 discloses that the “ . . . implantable stent is comprised of a flexible casing with an inner surface and an outer surface.” claim 3 of such patent discloses that the case may be “ . . . comprised of fluoropolymer.” claim 4 of such patent discloses that the casing may be “ . . . optically impermeable.”

[0451] Thus, e.g., claim 10 of U.S. Pat. No. 6,488,704 discloses an embodiment in which an implantable stent contains “ . . . telemetry means for transmitting a signal to a receiver located external to said implantable stent.” The telemetry means may be adapted to receive “ . . . a signal from a transmitter located external to said implantable stent (see claim 11); and such signal may be a radio-frequency signal (see claims 12 and 13). The implantable stent may also comprise “ . . . telemetry means for transmitting a signal to a receiver located external to said implantable stent” (see claim 22), and/or “ . . . telemetry means for receiving a signal from a transmitter located external to said implantable stent” (see claim 23), and/or “ . . . a controller operatively connected to said means for transmitting a signal to said receiver, and operatively connected to said means for receiving a signal from said transmitter” (see claim 24).

[0452] Thus, e.g., claim 14 of U.S. Pat. No. 6,488,704 describes an implantable stent that contains a waveguide array. The waveguide array may contain “ . . . a flexible optical waveguide device” (see claim 15), and/or “ . . . means for transmitting optical energy in a specified configuration” (see claim 16), and/or “ . . . a waveguide interface for receiving said optical energy transmitted in said specified configuration by said waveguide array” (see claim 17), and/or “ . . . means for filtering specified optical frequencies” (see claim 18). The implantable stent may be comprised of “ . . . means for receiving optical energy from said waveguide array” (see claim 19), and/or “ . . . means for processing said optical energy received from waveguide array” (see claim 20). The implantable stent may comprise “ . . . means for processing said radiation emitted by said optical radiation emitting means adapted with a wavelength from about 30 nanometers to about 30 millimeters” (see claim 21).

[0453] The implantable stent of U.S. Pat. No. 6,488,404 may be comprised of implantable laser devices. Thus, e.g., and referring again to U.S. Pat. No. 6,488,704, the implantable stent may be comprised of “ . . . a multiplicity of vertical cavity surface emitting lasers and photodetectors arranged in a monolithic configuration” (see claim 27), wherein “ . . . said monolithic configuration further comprises a multiplicity of optical drivers operatively connected to said vertical cavity surface emitting lasers” (see claim 28) and/or wherein “ . . . said vertical cavity surface emitting lasers each comprise a multiplicity of distributed Bragg reflector layers” (see claim 29), and/or wherein “ . . . each of said photodetectors comprises a multiplicity of distributed Bragg reflector layers” (see claim 30), and/or wherein “ . . . each of said vertical cavity surface emitting lasers is comprised of an emission layer disposed between a first distributed Bragg reflector layer and a second distributed Bragg reflector layer” (see claim 31), and/or wherein “ . . . said emission layer is comprised of a multiplicity of quantum well structures” (see claim 32), and/or wherein “ . . . each of said photodetectors is comprised of an absorption layer disposed between a first distributed Bragg reflector layer and a second distributed Bragg reflector layer” (see claim 33), and/or wherein “ . . . each of said vertical cavity surface emitting lasers and photodetectors is disposed on a separate semiconductor substrate” (see claim 34), and/or wherein “ . . . said semiconductor substrate comprises gallium arsenide.” These devices may advantageously be used in the process of this invention.

[0454] Referring again to U.S. Pat. No. 6,488,704, the entire disclosure of which is hereby incorporated by reference into this specification, the implantable stent may be comprised of an arithmetic unit (see claim 37 of such patent), and such arithmetic unit may be “ . . . comprised of means for receiving signals from said optical radiation detecting means” (see claim 38), and/or “ . . . means for calculating the concentration of components in an analyte disposed within said implantable stent (see claim 39). In one embodiment, “said means for calculating the concentration of components in said analyte calculates concentrations of said components in said analyte based upon optimum optical path lengths for different wavelengths and values of transmitted light (see claim 40).

[0455] Referring again to U.S. Pat. No. 6,488,704, the implantable stent may contain a power supply (see claim 41 thereof) which may contain a battery (see claim 42) which, in one embodiment, is a lithium-iodine battery (see claim 43).

[0456] U.S. Pat. No. 6,585,763, the entire disclosure of which is hereby incorporated by reference into this specification, describes in its claim 1 “ . . . a vascular graft comprising: a biocompatible material formed into a shape having a longitudinal axis to enclose a lumen disposed along said longitudinal axis of said shape, said lumen positioned to convey fluid through said vascular graft; a first transducer coupled to a wall of said vascular graft; and an implantable circuit for receiving electromagnetic signals, said implantable circuit coupled to said first transducer, said first transducer configured to receive a first energy from said circuit to emit a second energy having one or more frequencies and power levels to alter said biological activity of said medication in said localized area of said body subsequent to implantation of said first transducer in said body near said localized area.” One may use the means for “ . . . altering said biological activity of said medication . . . ” in the process of this invention. The transducer may be selected from the group consisting of “ . . . an ultrasonic transducer, a plurality of light sources, an electric field transducer, an electromagnetic transducer, and a resistive heating transducer” (see claim 2), it may comprise a coil (see claim 3), it may comprise “ . . . a regular solid including piezoelectric material, and wherein a first resonance frequency, being of said one or more frequencies, is determined by a first dimension of said regular solid and a second resonance frequency, being of said one or more frequencies, is determined by a second dimension of said regular solid and further including a first electrode coupled to said regular solid and a second electrode coupled to said regular solid” (see claim 4).

[0457] U.S. Pat. No. 6,605,089, the entire disclosure of which is hereby incorporated by reference into this specification, discloses an implantable bone growth promoting device. Claim 1 of this patent describes “A device for placement into and between at least two adjacent bone masses to promote bone growth therebetween, said device comprising: an implant having opposed first and second surfaces for placement between and in contact with the adjacent bone masses, a mid-longitudinal axis, and a hollow chamber between said first and second surfaces, said hollow chamber being adapted to hold bone growth promoting material, said hollow chamber being along at least a portion of the mid-longitudinal axis of said implant, each of said first and second surfaces having at least one opening in communication with said hollow chamber into which bone from the adjacent bone masses grows; and an energizer for energizing said implant, said energizer being sized and configured to promote bone growth from adjacent bone mass to adjacent bone mass through said first and second surfaces and through at least a portion of said hollow chamber at the mid-longitudinal axis.” The implant may have a coil wrapped around it (see claim 6), a portion of the coil may be “ . . . in the form of an external thread on at least a portion of said first and second surfaces of said implant” (see claim 7), the “external thread” may be energized by the “energizer” (claim 8) by conducting “ . . . electromagnetic energy to said interior space . . . ” of the energizer (claim 9). One may use such “energizer” in the process of this invention.

[0458] Referring again to U.S. Pat. No. 6,605,089, and to the implant claimed therein, the implant may contain “ . . . a power supply delivering an electric charge” (see claim 14), and it may comprise “ . . . a first portion that is electrically conductive for delivering said electrical charge to at least a portion of the adjacent bone masses and said energizer delivers negative electrical charge to said first portion of said implant” (see claim 15). Additionally, the implant may also contain “ . . . a controller for controlling the delivery of said electric charge” that is disposed within the implant (see claim 18), that “ . . . includes one of a wave form generator and a voltage generator” (see claim 19), and that “ . . . . provides for the delivery of one of an alternating current, a direct current, and a sinusoidal current” (see claim 21).

[0459] U.S. Pat. No. 6,641,520, the entire disclosure of which is hereby incorporated by reference into this specification, discloses a magnetic field generator for providing a static or direct current magnetic field generator; the magnetic field generator described in this patent may be used in conjunction the anti-mitotic compound and/or tubulin and/or microtubules. In column 1 of this patent, some “prior art” magnetic field generators were described; and they also may be so used. It was stated in such column 1 that: “There has recently been an increased interest in therapeutic application of magnetic fields. There have also been earlier efforts of others in this area. The recent efforts, as well as those earlier made, can be categorized into three general types, based on the mechanism for generating and applying the magnetic field. The first type was what could be generally referred to as systemic applications. These were large, tubular mechanisms which could accommodate a human body within them. A patient or recipient could thus be subjected to magnetic therapy through their entire body. These systems were large, cumbersome and relatively immobile. Examples of this type of therapeutic systems included U.S. Pat. Nos. 1,418,903; 4,095,588; 5,084,003; 5,160,591; and 5,437,600. A second type of system was that of magnetic therapeutic applicator systems in the form of flexible panels, belts or collars, containing either electromagnets or permanent magnets. These applicator systems could be placed on or about portion of the recipient's body to allow application of the magnetic therapy. Because of their close proximity to the recipient's body, considerations limited the amount and time duration of application of magnetic therapy. Examples of this type system were U.S. Pat. Nos. 4,757,804; 5,084,003 and 5,344,384. The third type of system was that of a cylindrical or toroidal magnetic field generator, often small and portable, into which a treatment recipient could place a limb to receive electromagnetic therapy. Because of size and other limitations, the magnetic field strength generated in this type system was usually relatively low. Also, the magnetic field was a time varying one. Electrical current applied to cause the magnetic field was time varying, whether in the form of simple alternating current waveforms or a waveform composed of a series of time-spaced pulses.”

[0460] The magnetic field generator claimed in U.S. Pat. No. 6,641,520 comprised “ . . . . a magnetic field generating coil composed of a wound wire coil generating the static magnetic field in response to electrical power; a mounting member having the coil mounted thereon and having an opening therethrough of a size to permit insertion of a limb of the recipient in order to receive electromagnetic therapy from the magnetic field coil; an electrical power supply furnishing power to the magnetic field coil to cause the coil to generate a static electromagnetic field within the opening of the mounting member for application to the recipient's limb; a level control mechanism providing a reference signal representing a specified electromagnetic field strength set point for regulating the power furnished to the magnetic field coil; a field strength sensor detecting the static electromagnetic field strength generated by the magnetic field coil and forming a field strength signal representing the detected electromagnetic field strength in the opening in the mounting member; a control signal generator receiving the field strength signal from the field strength sensor and the reference signal from the level control mechanism representing a specified electromagnetic field strength set point; and the control signal generator forming a signal to regulate the power flowing from the electrical power supply to the magnetic field coil.”

[0461] An implantable sensor is disclosed in U.S. Pat. No. 6,491,639, the entire disclosure of which is hereby incorporated by reference into this specification; this sensor also may be used in conjunction with the anti-mitotic compound of this invention, and/or tubulin, and/or microtubules. Claim 1 of such patent describes: “An implantable medical device including a sensor for use in detecting the hemodynamic status of a patient comprising: a hermetic device housing enclosing device electronics for receiving and processing data; and said device housing including at least one recess and a sensor positioned in said at least one recess.” Claim 10 of such patent describes “10. An implantable medical device including a hemodynamic sensor for monitoring arterial pulse amplitude comprising: a device housing; a transducer comprising a light source and a light detector positioned exterior to said device housing responsive to variations in arterial pulse amplitude; and wherein said light detector receives light originating from said light source and reflected from arterial vasculature of a patient and generates a signal which is indicative of variations in the reflected light caused by the expansion and contraction of said arterial vasculature. “Claim 14 of such patent describes: “14. An implantable medical device including a hemodynamic sensor for monitoring arterial pulse amplitude comprising: a device housing; and an ultrasound transducer associated with said device housing responsive to variations in arterial pulse amplitude.” claim 15 of such patent describes: “15. An implantable medical device including a hemodynamic sensor for monitoring arterial pulse amplitude comprising: a device housing; and a transducer associated with said device housing responsive to variations in arterial pulse amplitude, said device housing having at least one substantially planar face and said transducer is positioned on said planar face.” Claim 17 of such patent describes “ . . . an implantable pulse generator . . . ”

[0462] U.S. Pat. No. 6,663,555, the entire disclosure of which is incorporated by reference into this specification, also claims a magnetic field generator; this magnetic field generator may be used in conjunction with the anti-mitotic compound of this invention and/or tubulin and/or microtubules. Claim 1 of this patent describes: “A magnet keeper-shield assembly for housing a magnet, said magnet keeper-shield assembly comprising: a keeper-shield comprising a material substantially permeable to a magnetic flux; a cavity in the keeper-shield, said cavity comprising an inner side wall and a base, and said cavity being adapted to accept a magnet having a front and a bottom face; an actuator extending through the base; a plurality of springs extending through the base, said springs operative to exert a force in a range from about 175 pounds to about 225 pounds on the bottom face of the magnet in a retracted position, and wherein said magnet produces at least about 118 gauss at a distance of about 10 cm from the front face in the extended position and produces at most about 5 gauss at a distance less than or equal to about 22 cm from the front face in the retracted position.”

[0463] Published United States patent application US2002/0182738 discloses an implantable flow cytometer; the entire disclosure of this published United States patent application is hereby incorporated by reference into this specification. Claim 1 of this patent describes “A flow cytometer comprising means for sampling cellular material within a body, means for marking cells within said bodily fluid with a marker to produce marked cells, means for analyzing said marked cells, a first means for removing said marker from said marked cells, a second means for removing said marker from said marked cells, means for sorting said cells within said bodily fluid to produce sorted cells, and means for maintaining said sorted cells cells in a viable state.”

[0464] Referring again to published United States patent application US2002/0182738, the implantable flow cytometer may contain “ . . . a first control valve operatively connected to said first means for removing said marker from said marked cells and to said second means for removing said marker from said marked cells . . . ” (see claim 3), a controller connected to the first control valve (claim 4), a second control valve (claim 5), a third control valve (claim 6), a dye separator (claims 7 and 8), an analyzer for testing blood purity (claim 9), etc.

[0465] A similar flow cytometer is disclosed in published United States patent application US2003/0036718, the entire disclosure of which is also hereby incorporated by reference into this specification.

[0466] Published United States patent application US2003/0036776, the entire disclosure of which is hereby incorporated by reference into this specification, discloses an MRI-compatible implantable device. Claim 1 of this patent describes “A cardiac assist device comprising means for connecting said cardiac assist device to a heart, means for furnishing electrical impulses from said cardiac assist device to said heart, means for ceasing the furnishing of said electrical impulses to said heart, means for receiving pulsed radio frequency fields, means for transmitting and receiving optical signals, and means for protecting said heart and said cardiac assist device from currents induced by said pulsed radio frequency fields, wherein said cardiac assist device contains a control circuit comprised of a parallel resonant frequency circuit and means for activating said parallel resonant frequency circuit.” The “ . . . means for activating said parallel resonant circuit . . . . ” may contain “ . . . comprise optical means (see claim 2) such as an optical switch (claim 3) comprised of “ . . . a pin type diode . . . ” (claim 4) and connected to an optical fiber (claim 5). The optical switch may be “ . . . activated by light from a light source . . . ” (claim 6), and it may be located with a biological organism (claim 7). The light source may be located within the biological organism (claim 9), and it may provide “ . . . light with a wavelength of from about 750 to about 850 nanometers . . . . ”

Polymeric Carriers and/or Delivery Systems

[0467] The anti-mitotic compound of this invention may be used in conjunction with prior art polymeric carriers and/or delivery systems comprised of polymeric material.

[0468] In one embodiment, the polymeric material is preferably comprised of one or more anti-mitotic compounds that are adapted to be released from the polymeric material when the polymeric material is disposed within a biological organism. The polymeric material may be, e.g., any of the drug eluting polymers known to those skilled in the art.

[0469] By way of illustration, and referring to U.S. Pat. No. 3,279,996 (the entire disclosure of which is hereby incorporated by reference into this specification), the polymeric material may be silicone rubber. This patent claims “An implantate for releasing a drug in the tissues of a living organism comprising a drug enclosed in a capsule of silicone rubber, . . . said drug being soluble in and capable of diffusing through said silicone rubber to the outer surface of said capsule . . . . ” One may use, as the anti-mitotic compound a material that is soluble in and capable of diffusing through the polymeric material.

[0470] At column 1 of U.S. Pat. No. 3,279,996, other “carrier agents” which may be used as polymeric material are also disclosed, including “ . . . beeswax, peanut oil, stearates, etc.” Any of these “carrier agents” may be used as the polymeric material.

[0471] By way of further illustration, and as is disclosed in U.S. Pat. No. 4,191,741 (the entire disclosure of which is hereby incorporated by reference into this specification), one may use dimethylpolsiloxane rubber as the polymeric material. This patent claims “A solid, cylindrical, subcutaneous implant for improving the rate of weight gain of ruminant animals which comprises (a) a biocompatible inert core having a diameter of from about 2 to about 10 mm. and (b) a biocompatible coating having a thickness of from about 0.2 to about 1 mm., the composition of said coating comprising from about 5 to about 40 percent by weight of estradiol and from about 95 to about 60 percent by weight of a dimethylpolysiloxane rubber.”

[0472] In column 1 of U.S. Pat. No. 4,191,741, other materials which may be used as the polymeric material are disclosed. Thus, it is stated in such patent that “Long et al. U.S. Pat. No. 3,279,996 describes an implant for releasing a drug in the tissues of a living organism comprising the drug enclosed in a capsule formed of silicone rubber. The drug migrates through the silicone rubber wall and is slowly released into the living tissues. A number of biocompatible silicone rubbers are described in the Long et al. patent. When a drug delivery system such as that described in U.S. Pat. No. 3,279,996 is used in an effort to administer estradiol to a ruminant animal a number of problems are encountered. For example, an excess of the drug is generally required in the hollow cavity of the implant. Also, it is difficult to achieve a constant rate of administration of the drug over a long time period such as from 200 to 400 days as would be necessary for the daily administration of estradiol to a growing beef animal. Katz et al. U.S. Pat. No. 4,096,239 describes an implant pellet containing estradiol or estradiol benzoate which has an inert spherical core and a uniform coating comprising a carrier and the drug. The coating containing the drug must be both biocompatible and biosoluble, i.e., the coating must dissolve in the body fluids which act upon the pellet when it is implanted in the body. The rate at which the coating dissolves determines the rate at which the drug is released. Representative carriers for use in the coating material include cholesterol, solid polyethylene glycols, high molecular weight fatty acids and alcohols, biosoluble waxes, cellulose derivatives and solid polyvinyl pyrrolidone.” The polymeric material used with the anti-mitotic compound is, in one embodiment, both biocompatible and biosoluble.

[0473] By way of yet further illustration, and referring to U.S. Pat. No. 4,429,080 (the entire disclosure of which is hereby incorporated by reference into this specification), the polymeric material may be a synthetic absorbable copolymer formed by copolymerizing glycolide with trimethylene carbonate.

[0474] By way of yet further illustration, and referring to U.S. Pat. No. 4,581,028 (the entire disclosure of which is hereby incorporated by reference into this specification), the polymeric material may be selected from the group consisting of polyester (such as Dacron), polytetrafluoroethylene, polyurethane silicone-based material, and polyamide. The polymeric material of this patent is comprised “ . . . of at least one antimicrobial agent selected from the group consisting of the metal salts of sulfonamides.” In one embodiment, the polymeric material is comprised of an antimicrobial agent.

[0475] By way of yet further illustration, and referring to U.S. Pat. No. 4,481,353, (the entire disclosure of which is hereby incorporated by reference into this specification), the polymeric material may be the bioresorbable polyester disclosed in such patent. U.S. Pat. No. 4,481,353 claims “A bioresorbable polyester in which monomeric subunits are arranged randomly in the polyester molecules, said polyester comprising the condensation reaction product of a Krebs Cycle dicarboxylic acid or isomer or anhydride thereof, chosen for the group consisting of succinic acid, fumaric acid, oxaloacetic acid, L-malic acid, and D-malic acid, a diol having 2, 4, 6, or 8 carbon atoms, and an alpha-hydroxy carboxylic acid chosen from the group consisting of glycolic acid, L-lactic acid and D-lactic acid.”

[0476] By way of yet further illustration, and referring to U.S. Pat. No. 4,846,844 (the entire disclosure of which is hereby incorporated by reference into this specification), the polymeric material may be a silicone polymer matrix in which an anabolic agent (such as an anabolic steroid, or estradiol) is disposed. This patent claims “An implant adapted for the controlled release of an anabolic agent, said implant comprising a silicone polymer matrix, an anabolic agent in said polymer matrix, and an antimicrobial coating, wherein the coating comprises a first-applied non-vulcanizing silicone fluid and a subsequently applied antimicrobial agent in contact with said fluid.”

[0477] By way of yet further illustration, and referring to U.S. Pat. No. 4,916,193 (the entire disclosure of which is hereby incorporated by reference into this specification), the polymeric material may be a copolymer containing carbonate repeat units and ester repeat units (see, e.g., claim 1 of the patent). As disclosed in column 2 of the patent, it may also be “collagen,” “homopolymers and copolymers of glycolic acid and lactic acid,” “alpha-hydroxy carboxylic acids in conjunction with Krebs cycle dicarboxylic acids and aliphatic diols,” “polycarbonate-containing polymers,” and “high molecular weight fiber-forming crystalline copolymers of lactide and glycolide.” Thus, it is disclosed in such column 2 that: “Various polymers have been proposed for use in the fabrication of bioresorbable medical devices. Examples of absorbable materials used in nerve repair include collagen as disclosed by D. G. Kline and G. J. Hayes, “The Use of a Resorbable Wrapper for Peripheral Nerve Repair, Experimental Studies in Chimpanzees”, J. Neurosurgery 21, 737 (1964). Artandi et al., U.S. Pat. No. 3,272,204 (1966) reports the use of collagen protheses that are reinforced with nonabsorbable fabrics. These articles are intended to be placed permanently in a human body. However, one of the disadvantages inherent with collagenous materials, whether utilized alone or in conjunction with biodurable materials, is their potential antigenicity. Other biodegradable polymers of particular interest for medical implantation purposes are homopolymers and copolymers of glycolic acid and lactic acid. A nerve cuff in the form of a smooth, rigid tube has been fabricated from a copolymer of lactic and glycolic acids [The Hand; 10 (3) 259 (1978)]. European patent application No. 118-458-A discloses biodegradable materials used in organ protheses or artificial skin based on poly-L-lactic acid and/or poly-DL-lactic acid and polyester or polyether urethanes. U.S. Pat. No. 4,481,353 discloses bioresorbable polyester polymers, and composites containing these polymers, that are also made up of alpha-hydroxy carboxylic acids, in conjunction with Krebs cycle dicarboxylic acids and aliphatic diols. These polyesters are useful in fabricating nerve guidance channels as well as other surgical articles such as sutures and ligatures. U.S. Pat. Nos. 4,243,775 and 4,429,080 disclose the use of polycarbonate-containing polymers in certain medical applications, especially sutures, ligatures and haemostatic devices. However, this disclosure is clearly limited only to “AB” and “ABA” type block copolymers where only the “B” block contains poly(trimethylene carbonate) or a random copolymer of glycolide with trimethylene carbonate and the “A” block is necessarily limited to glycolide. In the copolymers of this patent, the dominant portion of the polymer is the glycolide component. U.S. Pat. No. 4,157,437 discloses high molecular weight, fiber-forming crystalline copolymers of lactide and glycolide which are disclosed as useful in the preparation of absorbable surgical sutures. The copolymers of this patent contain from about 50 to 75 wt. % of recurring units derived from glycolide.”

[0478] By way of further illustration, and referring to U.S. Pat. No. 5,176,907 (the entire disclosure of which is hereby incorporated by reference into this specification), the polymeric material may be the poly-phosphoester-urethane) described and claimed in claim 1 of such patent. Furthermore, the polymeric material may be one or more of the biodegradable polymers discussed in columns 1 and 2 of such patent. As is disclosed in such columns 1 and 2: “Polymers have been used as carriers of therapeutic agents to effect a localized and sustained release (Controlled Drug Delivery, Vol. I and II, Bruck, S. D., (ed.), CRC Press, Boca Raton, Fla., 1983; Leong, et al., Adv. Drug Delivery Review, 1:199, 1987). These anti-mitotic compound delivery systems simulate infusion and offer the potential of enhanced therapeutic efficacy and reduced systemic toxicity.” The polymeric material may be such a poly-phosphoester-urethane.

[0479] United States patent 5,176,907 also discloses “For a non-biodegradable matrix, the steps leading to release of the anti-mitotic compound are water diffusion into the matrix, dissolution of the therapeutic agent, and out-diffusion of the anti-mitotic compound through the channels of the matrix. As a consequence, the mean residence time of the anti-mitotic compound existing in the soluble state is longer for a non-biodegradable matrix than for a biodegradable matrix where a long passage through the channels is no longer required. Since many pharmaceuticals have short half-lives it is likely that the anti-mitotic compound is decomposed or inactivated inside the non-biodegradable matrix before it can be released. This issue is particularly significant for many bio-macromolecules and smaller polypeptides, since these molecules are generally unstable in buffer and have low permeability through polymers. In fact, in a non-biodegradable matrix, many bio-macromolecules will aggregate and precipitate, clogging the channels necessary for diffusion out of the carrier matrix. This problem is largely alleviated by using a biodegradable matrix which allows controlled release of the therapeutic agent. Biodegradable polymers differ from non-biodegradable polymers in that they are consumed or biodegraded during therapy. This usually involves breakdown of the polymer to its monomeric subunits, which should be biocompatible with the surrounding tissue. The life of a biodegradable polymer in vivo depends on its molecular weight and degree of cross-linking; the greater the molecular weight and degree of crosslinking, the longer the life. The most highly investigated biodegradable polymers are polylactic acid (PLA), polyglycolic acid (PGA), polyglycolic acid (PGA), copolymers of PLA and PGA, polyamides, and copolymers of polyamides and polyesters. PLA, sometimes referred to as polylactide, undergoes hydrolytic de-esterification to lactic acid, a normal product of muscle metabolism. PGA is chemically related to PLA and is commonly used for absorbable surgical sutures, as is the PLA/PGA copolymer. However, the use of PGA in controlled-release implants has been limited due to its low solubility in common solvents and subsequent difficulty in fabrication of devices.” The polymeric material 14 may be a biodegradable polymeric material.

[0480] U.S. Pat. No. 5,176,907 also discloses “An advantage of a biodegradable material is the elimination of the need for surgical removal after it has fulfilled its mission. The appeal of such a material is more than simply for convenience. From a technical standpoint, a material which biodegrades gradually and is excreted over time can offer many unique advantages.”

[0481] U.S. Pat. No. 5,176,907 also discloses “A biodegradable thereapeutic agent delivery system has several additional advantages: 1) the therapeutic agent release rate is amenable to control through variation of the matrix composition; 2) implantation can be done at sites difficult or impossible for retrieval; 3) delivery of unstable therapeutic agents is more practical. This last point is of particular importance in light of the advances in molecular biology and genetic engineering which have lead to the commercial availability of many potent bio-macromolecules. The short in vivo half-lives and low GI tract absorption of these polypeptides render them totally unsuitable for conventional oral or intravenous administration. Also, because these substances are often unstable in buffer, such polypeptides cannot be effectively delivered by pumping devices.”

[0482] U.S. Pat. No. 5,176,907 also discloses “In its simplest form, a biodegradable therapeutic agent delivery system consist of a dispersion of the drug solutes in a polymer matrix. The therapeutic agent is released as the polymeric matrix decomposes, or biodegrades into soluble products which are excreted from the body. Several classes of synthetic polymers, including polyesters (Pitt, et al., in Controlled Release of Bioactive Materials, R. Baker, Ed., Academic Press, New York, 1980); polyamides (Sidman, et al., Journal of Membrane Science, 7:227, 1979); polyurethanes (Maser, et al., Journal of Polymer Science, Polymer Symposium, 66:259, 1979); polyorthoesters (Heller, et al., Polymer Engineering Science, 21:727, 1981); and polyanhydrides (Leong, et al., Biomaterials, 7:364, 1986) have been studied for this purpose.” The “therapeutic agent” used in this (and other) patents may be the anti-mitotic compound of this invention.

[0483] By way of yet further illustration, and referring to U.S. Pat. No. 5,194,581 (the entire disclosure of which is hereby incorporated by reference into this specification), the polymeric material may the poly (phosphoester) compositions described in such patent.

[0484] The polymeric material may be in the form of microcapsules within which the anti-mitotic compound of this invention is disposed. Thus, one may use microcapusels such as, e.g., the microcapsule described in U.S. Pat. No. 6,117,455, the entire disclosure of which is hereby incorporated by reference into this specification. As is disclosed in the abstract of this patent, there is provided “A sustained-release microcapsule contains an amorphous water-soluble pharmaceutical agent having a particle size of from 1 nm-10 μm and a polymer. The microcapsule is produced by dispersing, in an aqueous phase, a dispersion of from 0.001-90% (w/w) of an amorphous water-soluble pharmaceutical agent in a solution of a polymer having a wt. avg. molecular weight of 2,000-800,000 in an organic solvent to prepare an s/o/w emulsion and subjecting the emulsion to in-water drying.”

[0485] In one embodiment, disclosed in U.S. Pat. No. 5,484,584 (the entire disclosure of which is hereby incorporated by reference into this specification), a poly (benzyl-L-glutamate) microsphere is disclosed (see, e.g., claim 10); the anti-mitotic compound of this invention may be disposed within and/or on the surface of such microsphere. As is disclosed in the abstract of this patent, “The present invention relates to a highly efficient method of preparing modified microcapsules exhibiting selective targeting. These microcapsules are suitable for encapsulation surface attachment of therapeutic and diagnostic agents. In one aspect of the invention, surface charge of the polymeric material is altered by conjugation of an amino acid ester to the providing improved targeting of encapsulated agents to specific tissue cells. Examples include encapsulation of radiodiagnostic agents in 1 μm capsules to provide improved opacification and encapsulation of cytotoxic agents in 100 μm capsules for chemoembolization procedures. The microcapsules are suitable for attachment of a wide range of targeting agents, including antibodies, steroids and drugs, which may be attached to the microcapsule polymer before or after formation of suitably sized microcapsules. The invention also includes microcapsules surface modified with hydroxyl groups. Various agents such as estrone may be attached to the microcapsules and effectively targeted to selected organs.”

[0486] The release rate of the anti-mitotic compound from the polymeric material may be varied in, e.g., the manner suggested in column 6 of U.S. Pat. No. 5,194,581, the entire disclosure of which is hereby incorporated by reference into this specification. As is disclosed in such column 6, “A wide range of degradation rates can be obtained by adjusting the hydrophobicities of the backbones of the polymers and yet the biodegradability is assured. This can be achieved by varying the functional groups R or R′. The combination of a hydrophobic backbone and a hydrophilic linkage also leads to heterogeneous degradation as cleavage is encouraged, but water penetration is resisted.” As is disclosed at column 9 of such patent, “The rate of biodegradation of the poly(phosphoester) compositions of the invention may also be controlled by varying the hydrophobicity of the polymer. The mechanism of predictable degradation preferably relies on either group R′ in the poly(phosphoester) backbone being hydrophobic for example, an aromatic structure, or, alternatively, if the group R′ is not hydrophobic, for example an aliphatic group, then the group R is preferably aromatic. The rates of degradation for each poly(phosphoester) composition are generally predictable and constant at a single pH. This permits the compositions to be introduced into the individual at a variety of tissue sites. This is especially valuable in that a wide variety of compositions and devices to meet different, but specific, applications may be composed and configured to meet specific demands, dimensions, and shapes—each of which offers individual, but different, predictable periods for degradation. When the composition of the invention is used for long term delivery of an anti-mitotic compound a relatively hydrophobic backbone matrix, for example, containing bisphenol A, is preferred. It is possible to enhance the degradation rate of the poly(phosphoester) or shorten the functional life of the device, by introducing hydrophilic or polar groups, into the backbone matrix. Further, the introduction of methylene groups into the backbone matrix will usually increase the flexibility of the backbone and decrease the crystallinity of the polymer. Conversely, to obtain a more rigid backbone matrix, for example, when used orthopedically, an aromatic structure, such as a diphenyl group, can be incorporated into the matrix. Also, the poly(phosphoester) can be crosslinked, for example, using 1,3,5-trihydroxybenzene or (CH2 OH)4 C, to enhance the modulus of the polymer. Similar considerations hold for the structure of the side chain (R).”

[0487] By way of yet further illustration, and referring to U.S. Pat. No. 5,252,713 (the entire disclosure of which is hereby incorporated by reference into this specification), the polymeric material may be a polypeptide comprising at least one drug-binding domain that non-covalently binds a drug. The means of identifying and isolating such a polypeptide is described at columns 5-7 of the patent, wherein it is disclosed that: “The process of isolating a polymeric carrier from a drug-binding, large molecular weight protein begins with the identification of a large protein that can non-covalently bind the drug of interest. Examples of such protein/drug pairs are shown in Table I. The drugs in the Table (other than the steroids) are anti-cancer drugs . . . ”

[0488] As is also disclosed in U.S. Pat. No. 5,252,713, “Other drug-binding proteins may be identified by appropriate analytical procedures, including Western blotting of large proteins or protein fragments and subsequent incubation with a detectable form of drug. Alternative procedures include combining a drug and a protein in a solution, followed by size exclusion HPLC gel filtration, thin-layer chromatography (TLC), or other analytical procedures that can discriminate between free and protein-bound drug. Detection of drug binding can be accomplished by using radiolabeled, fluorescent, or colored drugs and appropriate detection methods. Equilibrium dialysis with labeled drug may be used. Alternative methods include monitoring the fluorescence change that occurs upon binding of certain drugs (e.g., anthracyclines or analogs thereof, which should be fluorescent) . . . . “In one detection method, drug and protein are mixed, and an aliquot of this solution (not exceeding 5% of the column volume of an HPLC column, such as a Bio-sil TSK-250 7.5×30 cm column) is loaded onto the HPLC column. The flow rate is 1 ml/min. The drug bound to protein will elute first, in a separate peak, followed by free drug, eluting at a position characteristic of its molecular weight. If the drug is doxorubicin, both a 280-nm as well as a 495-nm adsorptive peak will correspond to the elution position of the protein if interaction occurs. The elution peaks for other drugs will indicate whether drug binding occurs . . . . ”

[0489] As is also disclosed in U.S. Pat. No. 5,252,713, “Knowledge of the chemical structure of a particular drug (i.e., whether chemically reactive functional groups are present) allows one to predict whether covalent binding of the drug to a given protein can occur. Additional methods for determining whether drug binding is covalent or non-covalent include incubating the drug with the protein, followed by dialysis or subjecting the protein to denaturing conditions. Release of the drug from the drug-binding protein during these procedures indicates that the drug was non-covalently bound. Usually, a dissociation constant of about 10-15 M or less indicates covalent or extremely tight non-covalent binding . . . . ”

[0490] As is also disclosed in U.S. Pat. No. 5,252,713, “During dialysis, non-covalently bound drug molecules are released over time from the protein and pass through a dialysis membrane, whereas covalently bound drug molecules are retained on the protein. An equilibrium constant of about 10-5 M indicates non-covalent binding. Alternatively, the protein may be subjected to denaturing conditions; e.g., by gel electrophoresis on a denaturing (SDS) gel or on a gel filtration column in the presence of a strong denaturant such as 6M guanidine. Covalently bound drug molecules remain bound to the denatured protein, whereas non-covalently bound drug molecules are released and migrate separately from the protein on the gel and are not retained with the protein on the column.”

[0491] As is also disclosed in U.S. Pat. No. 5,252,713, “Once a protein that can non-covalently bind a particular drug of interest is identified, the drug-binding domain is identified and isolated from the protein by any suitable means. Protein domains are portions of proteins having a particular function or activity (in this case, non-covalent binding of drug molecules). The present invention provides a process for producing a polymeric carrier, comprising the steps of generating peptide fragments of a protein that is capable of non-covalently binding a drug and identifying a drug-binding peptide fragment, which is a peptide fragment containing a drug-binding domain capable of non-covalently binding the drug, for use as the polymeric carrier.”

[0492] As is also disclosed in U.S. Pat. No. 5,252,713, “One method for identifying the drug-binding domain begins with digesting or partially digesting the protein with a proteolytic enzyme or specific chemicals to produce peptide fragments. Examples of useful proteolytic enzymes include lys-C-endoprotease, arg-C-endoprotease, V8 protease, endoprolidase, trypsin, and chymotrypsin. Examples of chemicals used for protein digestion include cyanogen bromide (cleaves at methionine residues), hydroxylamine (cleaves the Asn-Gly bond), dilute acetic acid (cleaves the Asp-Pro bond), and iodosobenzoic acid (cleaves at the tryptophane residue). In some cases, better results may be achieved by denaturing the protein (to unfold it), either before or after fragmentation.”

[0493] As is also disclosed in U.S. Pat. No. 5,252,713, “The fragments may be separated by such procedures as high pressure liquid chromatography (HPLC) or gel electrophoresis. The smallest peptide fragment capable of drug binding is identified using a suitable drug-binding analysis procedure, such as one of those described above. One such procedure involves SDS-PAGE gel electrophoresis to separate protein fragments, followed by Western blotting on nitrocellulose, and incubation with a colored drug like adriamycin. The fragments that have bound the drug will appear red. Scans at 495 nm with a laser densitometer may then be used to analyze (quantify) the level of drug binding.”

[0494] As is also disclosed in U.S. Pat. No. 5,252,713, “Preferably, the smallest peptide fragment capable of non-covalent drug binding is used. It may occasionally be advisable, however, to use a larger fragment, such as when the smallest fragment has only a low-affinity drug-binding domain.”

[0495] As is also disclosed in U.S. Pat. No. 5,252,713, “The amino acid sequence of the peptide fragment containing the drug-binding domain is elucidated. The purified fragment containing the drug-binding region is denatured in 6M guanidine hydrochloride, reduced and carboxymethylated by the method of Crestfield et al., J. Biol. Chem. 238:622, 1963. As little as 20 to 50 picomoles of each peptide fragment can be analyzed by automated Edman degradation using a gas-phase or liquid pulsed protein sequencer (commercially available from Applied Biosystems, Inc.). If the peptide fragment is longer than 30 amino acids, it will most likely have to be fragmented as above and the amino acid sequence patched together from sequences of overlapping fragments.”

[0496] As is also disclosed in U.S. Pat. No. 5,252,713, “Once the amino acid sequence of the desired peptide fragment has been determined, the polymeric carriers can be made by either one of two types of synthesis. The first type of synthesis comprises the preparation of each peptide chain with a peptide synthesizer (e.g., commercially available from Applied Biosystems). The second method utilizes recombinant DNA procedures.” The polymeric material 14 may comprise one or more of the polymeric carriers described in U.S. Pat. No. 5,252,713.

[0497] As is also disclosed in U.S. Pat. No. 5,252,713, “Peptide amides can be made using 4-methylbenzhydrylamine-derivatized, cross-linked polystyrene-1% divinylbenzene resin and peptide acids made using PAM (phenylacetamidomethyl) resin (Stewart et al., “Solid Phase Peptide Synthesis,” Pierce Chemical Company, Rockford, III., 1984). The synthesis can be accomplished either using a commercially available synthesizer, such as the Applied Biosystems 430A, or manually using the procedure of Merrifield et al., Biochemistry 21:5020-31, 1982; or Houghten, PNAS 82:5131-35, 1985. The side chain protecting groups are removed using the Tam-Merrifield low-high HF procedure (Tam et al., J. Am. Chem. Soc. 105:6442-55, 1983). The peptide can be extracted with 20% acetic acid, lyophilized, and purified by reversed-phase HPLC on a Vydac C-4 Analytical Column using a linear gradient of 100% water to 100% acetonitrile-0.1% trifluoroacetic acid in 50 minutes. The peptide is analyzed using PTC-amino acid analysis (Heinrikson et al., Anal. Biochem. 136:65-74, 1984). After gas-phase hydrolysis (Meltzer et al., Anal. Biochem. 160: 356-61, 1987), sequences are confirmed using the Edman degradation or fast atom bombardment mass spectroscopy. After synthesis, the polymeric carriers can be tested for drug binding using size-exclusion HPLC, as described above, or any of the other analytical methods listed above.”

[0498] The polymeric carriers of U.S. Pat. No. 5,252,713 may be used with the anti-mitotic compounds of this invention. As is also disclosed in U.S. Pat. No. 5,252,713, “The polymeric carriers of the present invention preferably comprise more than one drug-binding domain. A polypeptide comprising several drug-binding domains may be synthesized. Alternatively, several of the synthesized drug-binding peptides may be joined together using bifunctional cross-linkers, as described below.” The polymeric material in one embodiment, comprises more than one drug-binding domain.

[0499] By way of yet further illustration, and referring to U.S. Pat. No. 5,420,105 (the entire disclosure of which is hereby incorporated by reference into this specification), the polymeric material may form a conjugate with a ligand. Thus, and referring to claim 1 of such patent, such conjugate may be “A ligand or an anti-ligand/polymeric carrier/drug conjugate comprising a ligand consisting of biotin or an anti-ligand selected from the group consisting of avidin and streptavidin, which ligand or anti-ligand is covalently bound to a polymeric carrier that comprises at least one drug-binding domain derived from a drug-binding protein, and at least one drug non-covalently bound to the polymeric carrier, wherein the polymeric carrier does not comprise an entire drug-binding protein, but is derived from a drug-binding domain of said drug-binding protein which derivative non-covalently binds a drug which is non-covalently bound by an entire naturally occurring drug-binding protein, and wherein the molecular weight of the polymeric carrier is less than about 60,000 daltons, and wherein said drug is selected from the group consisting of an anti-cancer anthracycline antibiotic, cis-platinum, methotrexate, vinblastine, mitoxanthrone ARA-C, 6-mercaptopurine, 6-mercaptoguanosine, mytomycin C and a steroid.”

[0500] The polymeric material form comprise a reservoir (see U.S. Pat. No. 5,447,724) for the anti-mitotic compound(s). Such a reservoir may be constructed in accordance with the procedure described in U.S. Pat. No. 5,447,724, which claims “A medical device at least a portion of which comprises: a body insertable into a patient, said body having an exposed surface which is adapted for exposure to tissue of a patient and constructed to release, at a predetermined rate, therapeutic agent to inhibit adverse physiological reaction of said tissue to the presence of the body of said medical device, said therapeutic agent selected from the group consisting of antithrombogenic agents, antiplatelet agents, prostaglandins, thrombolytic drugs, antiproliferative drugs, antirejection drugs, antimicrobial drugs, growth factors, and anticalcifying agents, at said exposed surface, said body including: an outer polymer metering layer, and an internal polymer layer underlying and supporting said outer polymer metering layer and in intimate contact therewith, said internal polymer layer defining a reservoir for said therapeutic agent, said reservoir formed by a polymer selected from the group consisting of polyurethanes and its copolymers, silicone and its copolymers, ethylene vinylacetate, thermoplastic elastomers, polyvinylchloride, polyolefins, cellulosics, polyamides, polytetrafluoroethylenes, polyesters, polycarbonates, polysulfones, acrylics, and acrylonitrile butadiene styrene copolymers, said outer polymer metering layer having a stable, substantially uniform, predetermined thickness covering the underlying reservoir so that no portion of the reservoir is directly exposed to body fluids and incorporating a distribution of an elutable component which, upon exposure to body fluid, elutes from said outer polymer metering layer to form a predetermined porous network capable of exposing said anti-mitotic compoundin said reservoir in said internal polymer layer to said body fluid, said elutable component is selected from the group consisting of polyethylene oxide, polyethylene glycol, polyethylene oxide/polypropylene oxide copolymers, polyhydroxyethylmethacrylate, polyvinylpyrollidone, polyacrylamide and its copolymers, liposomes, albumin, dextran, proteins, peptides, polysaccharides, polylactides, polygalactides, polyanhydrides, polyorthoesters and their copolymers, and soluble cellulosics, said reservoir defined by said internal polymer layer incorporating said therapeutic agent in a manner that permits substantially free outward release of said therapeutic agent from said reservoir into said porous network of said outer polymer metering layer as said elutable component elutes from said polymer metering layer, said predetermined thickness and the concentration and particle size of said elutable component being selected to enable said outer polymer metering layer to meter the rate of outward migration of the thereapuetic agent from said internal reservoir layer through said outer polymer metering layer, said outer polymer metering layer and said internal polymer layer, in combination, enabling prolonged controlled release, at said predetermined rate, of said therapeutic agent at an effective dosage level from said exposed surface of said body of said medical device to the tissue of said patient to inhibit adverse reaction of the patient to the prolonged presence of said body of said medical device in said patient.”

[0501] U.S. Pat. No. 5,447,724 also discloses the preparation of the “reservoir” in e.g., in columns 8 and 9 of the patent, wherein it is disclosed that: “A particular advantage of the time-release polymers of the invention is the manufacture of coated articles, i.e., medical instruments. Referring now to FIG. 3, the article to be coated such as a catheter 50 may be mounted on a mandrel or wire 60 and aligned with the preformed apertures 62 (slightly larger than the catheter diameter) in the teflon bottom piece 63 of a boat 64 that includes a mixture 66 of polymer at ambient temperature, e.g., 25° C. To form the reservoir portion, the mixture may include, for example, nine parts solvent, e.g. tetrahydrofuran (THF), and one part Pellthane® polyurethane polymer which includes the desired proportion of ground sodium heparin particles. The boat may be moved in a downward fashion as indicated by arrow 67 to produce a coating 68 on the exterior of catheter 50. After a short (e.g., 15 minutes) drying period, additional coats may be added as desired. After coating, the catheter 50 is allowed to air dry at ambient temperature for about two hours to allow complete solvent evaporation and/or polymerization to form the reservoir portion. For formation of the surface-layer the boat 64 is cleaned of the reservoir portion mixture and filled with a mixture including a solvent, e.g. THF (9 parts) and Pellthane® (1 part) having the desired amount of elutable component. The boat is moved over the catheter and dried, as discussed above to form the surface-layer. Subsequent coats may also be formed. An advantage of the dipping method and apparatus described with regard to FIG. 3 is that highly uniform coating thickness may be achieved since each portion of the substrate is successively in contact with the mixture for the same period of time and further, no deformation of the substrate occurs. Generally, for faster rates of movement of the boat 64, thicker layers are formed since the polymer gels along the catheter surfaces upon evaporation of the solvent, rather than collects in the boat as happens with slower boat motion. For thin layers, e.g., on the order of a few mils, using a fairly volatile solvent such as THF, the dipping speed is generally between 26 to 28 cm/min for the reservoir portion and around 21 cm/min for the outer layer for catheters in the range of 7 to 10° F. The thickness of the coatings may be calculated by subtracting the weight of the coated catheter from the weight of the uncoated catheter, dividing by the calculated surface area of the uncoated substrate and dividing by the known density of the coating. The solvent may be any solvent that solubilizes the polymer and preferably is a more volatile solvent that evaporates rapidly at ambient temperature or with mild heating. The solvent evaporation rate and boat speed are selected to avoid substantial solubilizing of the catheter substrate or degradation of a prior applied coating so that boundaries between layers are formed.”

[0502] By way of yet further illustration, and referring to U.S. Pat. No. 5,464,650 (the entire disclosure of which is hereby incorporated by reference into this specification), the polymeric material may be one or ore of the polymeric materials discussed at columns 4 and 5 of such patent. Referring to such columns 4 and 5, it is disclosed that: “The polymer chosen must be a polymer that is biocompatible and minimizes irritation to the vessel wall when the stent is implanted. The polymer may be either a biostable or a bioabsorbable polymer depending on the desired rate of release or the desired degree of polymer stability, but a bioabsorbable polymer is probably more desirable since, unlike a biostable polymer, it will not be present long after implantation to cause any adverse, chronic local response. Bioabsorbable polymers that could be used include poly(L-lactic acid), polycaprolactone, poly(lactide-co-glycolide), poly(hydroxybutyrate), poly(hydroxybutyrate-co-valerate), polydioxanone, polyorthoester, polyanhydride, poly(glycolic acid), poly(D,L-lactic acid), poly(glycolic acid-co-trimethylene carbonate), polyphosphoester, polyphosphoester urethane, poly(amino acids), cyanoacrylates, poly(trimethylene carbonate), poly(iminocarbonate), copoly(ether-esters) (e.g. PEO/PLA), polyalkylene oxalates, polyphosphazenes and biomolecules such as fibrin, fibrinogen, cellulose, starch, collagen and hyaluronic acid. Also, biostable polymers with a relatively low chronic tissue response such as polyurethanes, silicones, and polyesters could be used and other polymers could also be used if they can be dissolved and cured or polymerized on the stent such as polyolefins, polyisobutylene and ethylene-alphaolefin copolymers; acrylic polymers and copolymers, vinyl halide polymers and copolymers, such as polyvinyl chloride; polyvinyl ethers, such as polyvinyl methyl ether; polyvinylidene halides, such as polyvinylidene fluoride and polyvinylidene chloride; polyacrylonitrile, polyvinyl ketones; polyvinyl aromatics, such as polystyrene, polyvinyl esters, such as polyvinyl acetate; copolymers of vinyl monomers with each other and olefins, such as ethylene-methyl methacrylate copolymers, acrylonitrile-styrene copolymers, ABS resins, and ethylene-vinyl acetate copolymers; polyamides, such as Nylon 66 and polycaprolactam; alkyd resins; polycarbonates; polyoxymethylenes; polyimides; polyethers; epoxy resins, polyurethanes; rayon; rayon-triacetate; cellulose, cellulose acetate, cellulose butyrate; cellulose acetate butyrate; cellophane; cellulose nitrate; cellulose propionate; cellulose ethers; and carboxymethyl cellulose. The ratio of therapeutic substance to polymer in the solution will depend on the efficacy of the polymer in securing the therapeutic substance onto the stent and the rate at which the coating is to release the therapeutic substance to the tissue of the blood vessel. More polymer may be needed if it has relatively poor efficacy in retaining the therapeutic substance on the stent and more polymer may be needed in order to provide an elution matrix that limits the elution of a very soluble therapeutic substance. A wide ratio of therapeutic substance to polymer could therefore be appropriate and could range from about 10:1 to about 1:100.”

[0503] By way of yet further illustration, and referring to U.S. Pat. No. 5,470,307 (the entire disclosure of which is hereby incorporated by reference into this specification), the polymeric material may a synthetic or natural polymer, such as polyamide, polyester, polyolefin (polypropylene or polyethylene), polyurethane, latex, acrylamide, methacrylate, polyvinylchloride, polysuflone, and the like, see, e.g., column 11 of the patent.

[0504] In one embodiment, the polymeric material is bound to the anti-mitotic compound by one or more photosensitive linkers. The process of preparing and binding these photosensitive linkers is described in columns 8-9 of U.S. Pat. No. 5,470,307, wherein it is disclosed that: “The process of fabricating a catheter 10 having a desired therapeutic agent 20 connected thereto and then controllably and selectively releasing that therapeutic agent 20 at a remote site within a patient may be summarized in five steps. 1. Formation of Substrate. The substrate layer 16 is formed on or applied to the surface 14 of the catheter body 12, and subsequently or simultaneously prepared for coupling to the linker layer 18. This is accomplished by modifying the substrate layer 16 to expose or add groups such as carboxyls, amines, hydroxyls, or sulfhydryls. In some cases, this may be followed by customizing the substrate layer 16 with an extender 22 that will change the functionality, for example by adding a maleimide group that will accept a Michael's addition of a sulfhydryl at one end of a bifunctional photolytic linker 18. The extent of this derivitization is measured by adding group-specific probes (such as 1 pyrenyl diazomethane for carboxyls, 1 pyrene butyl hydrazine for amines, or Edman's reagent for sulfhydryls Molecular Probes, Inc. of Eugene, Oreg. or Pierce Chemical of Rockford, III.) or other fluorescent dyes that may be measured optically or by flow cytometry. The substrate layer 16 can be built up to increase its capacity by several methods, examples of which are discussed below.”

[0505] As is also dislosed in United Sttes patent 5,470,307, “2. Selection of Photolytic Release Mechanism. A heterobifunctional photolytic linker 18 suitable for the selected therapeutic agent d20 and designed to couple readily to the functionality of the substrate layer 16 is prepared, and may be connected to the substrate layer 16. Alternately, the photolinker 18 may first be bonded to the therapeutic agent 20, with the combined complex of the therapeutic agent 20 and photolytic linker 18 together being connected to the substrate layer 16. 3. Selection of the Therapeutic Agent. Selection of the appropriate therapeutic agent 20 for a particular clinical application will depend upon the prevailing medical practice. One representative example described below for current use in PTCA and PTA procedures involves the amine terminal end of a twelve amino acid peptide analogue of hirudin being coupled to a chloro carbonyl group on the photolytic linker 18. Another representative example is provided below where the therapeutic agent 20 is a nucleotide such as an antisense oligodeoxynucleotide where a terminal phosphate is bonded by means of a diazoethane located on the photolytic linker 18. A third representative example involves the platelet inhibitor dipyridamole (persantin) that is attached through an alkyl hydroxyl by means of a diazo ethane on the photolytic linker 18. 4. Fabrication of the Linker-Agent Complex and Attachment to the Substrate. The photolytic linker 18 or the photolytic linker 18 with the therapeutic agent 20 attached are connected to the substrate layer 16 to complete the catheter 10. A representative example is a photolytic linker 18 having a sulfhydryl disposed on the non-photolytic end for attachment to the substrate layer 16, in which case the coupling will occur readily in a neutral buffer solution to a maleimide-modified substrate layer 16 on the catheter 10. Once the therapeutic agent 20 has been attached to the catheter 10, it is necessary that the catheter 10 be handled in a manner that prevents damage to the substrate layer 16, photolytic linker layer 18, and therapeutic agent 20, which may include subsequent sterilization, protection from ambient light, heat, moisture, and other environmental conditions that would adversely affect the operation or integrity of the drug-delivery catheter system 10 when used to accomplish a specific medical procedure on a patient.”

[0506] In the process of U.S. Pat. No. 5,470,307, the linker is preferably bound to the polymeric material through a modified functional group. The preparation of such modified functional groups is discussed at columns 10-13 of such patent, wherein it is disclosed that: “Most polymers including those discussed herein can be made of materials which have modifiable functional groups or can be treated to expose such groups. Polyamide (nylon) can be modified by acid treatment to produce exposed amines and carboxyls. Polyethylene terephthalate (PET, Dacron@) is a polyester and can be chemically treated to expose hydroxyls and carboxyls. Polystyrene has an exposed phenyl group that can be derivitized. Polyethylene and polypropylene (collectively referred to as polyolefins) have simple carbon backbones which can be derivitized by treatment with chromic and nitric acids to produce carboxyl functionality, photocoupling with suitably modified benzophenones, or by plasma grafting of selected monomers to produce the desired chemical functionality. For example, grafting of acrylic acid will produce a surface with a high concentration of carboxyl groups, whereas thiophene or 1,6 diaminocyclohexane will produce a surface containing sulfhydryls or amines, respectively. The surface functionality can be modified after grafting of a monomer by addition of other functional groups. For example, a carboxyl surface can be changed to an amine by coupling 1,6 diamino hexane, or to a sulfhydryl surface by coupling mercapto ethyl amine.”

[0507] As is also disclosed in United Sttes patent 5,470,307, “Acrylic acid can be polymerized onto latex, polypropylene, polysulfone, and polyethylene terephthalate (PET) surfaces by plasma treatment. When measured by toluidine blue dye binding, these surfaces show intense modification. On polypropylene microporous surfaces modified by acrylic acid, as much as 50 nanomoles of dye binding per cm2 of external surface area can be found to represent carboxylated surface area. Protein can be linked to such surfaces using carbonyl diimidazole (CDI) in tetrahydrofuran as a coupling system, with a resultant concentration of one nanomole or more per cm2 of external surface. For a 50,000 Dalton protein, this corresponds to 50 μg per cm2, which is far above the concentration expected with simple plating on the surface. Such concentrations of an anti-mitotic compound 20 on the angioplasty (PTCA) balloon of a catheter 10, when released, would produce a high concentration of that therapeutic agent 20 at the site of an expanded coronary artery. However, plasma-modified surfaces are difficult to control and leave other oxygenated carbons that may cause undesired secondary reactions”

[0508] As is also disclosed in U.S. Pat. No. 5,470,307, “In the case of balloon dilation catheters 10, creating a catheter body 12 capable of supporting a substrate layer 16 with enhanced surface area can be done by several means known to the art including altering conditions during balloon spinning, doping with appropriate monomers, applying secondary coatings such as polyethylene oxide hydrogel, branched polylysines, or one of the various Starburst.™. dendrimers offered by the Aldrich Chemical Company of Milwaukee, Wis.”

[0509] As is also disclosed in U.S. Pat. No. 5,470,307, “The most likely materials for the substrate layer 16 in the case of a dilation balloon catheter 10 or similar apparatus are shown in FIGS. 1a-1g, including synthetic or natural polymers such as polyamide, polyester, polyolefin (polypropylene or polyethylene), polyurethane, and latex. For solid support catheter bodies 12, usable plastics might include acrylamides, methacrylates, urethanes, polyvinylchloride, polysulfone, or other materials such as glass or quartz, which are all for the most part derivitizable.”In one embodiment, depicted in FIG. 1A, the photosensitive linker is bonded to a plastic container 12.

[0510] As is also disclosed in U.S. Pat. No. 5,470,307, “Referring to the polymers shown in FIGS. 1a-1g, polyamide (nylon) is treated with 3-5M hydrochloric acid to expose amines and carboxyl groups using conventional procedures developed for enzyme coupling to nylon tubing. A further description of this process may be obtained from Inman, D. J. and Hornby, W. E., The Iramobilization of Enzymes on Nylon Structures and their Use in Automated Analysis, Biochem. J. 129:255-262 (1972) and Daka, N.J. and Laidler, Flow kinetics of lactate dehydrogenase chemically attached to nylon tubing, K. J., Can. J. Biochem. 56:774-779 (1978). This process will release primary amines and carboxyls. The primary amine group can be used directly, or succinimidyl 4 (p-maleimidophenyl) butyrate (SMBP) can be coupled to the amine function leaving free the maleimide to couple with a sulfhydryl on several of the photolytic linkers 18 described below and acting as an extender 22. If needed, the carboxyl released can also be converted to an amine by first protecting the amines with BOC groups and then coupling a diamine to the carboxyl by means of carbonyl diimidazole (CDI).” The polymeric material 14, and/or the container 12, may comprise or consist essentially of nylon.

[0511] As is also disclosed in U.S. Pat. No. 5,470,307, “Polyester (Dacron®) can be functionalized using 0.01 N NaOH in 10% ethanol to release hydroxyl and carboxyl, groups in the manner described by Blassberger, D. et al, Chemically Modified Polyesters as Supports for Enzyme Iramobilization: Isocyanide, Acylhydrazine, and Aminoaryl derivatives of Poly(ethylene Terephthalate), Biotechnol. and Bioeng. 20:309-315 (1978). A diamine is added directly to the etched surface using CDI and then reacted with SMBP to yield the same maleimide reacting group to accept the photolytic linker 18.” The polymeric material 14, and/or the container 12, may comprise or consist essentially of polyester.”

[0512] As is also disclosed in U.S. Pat. No. 5,470,307, “Polystyrene can be modified many ways, however perhaps the most useful process is chloromethylation, as originally described by Merrifield, R. B., Solid Phase Synthesis. I. The Synthesis of a Tetrapeptide, J. Am. Chem Soc. 85:2149-2154 (1963), and later discussed by Atherton, E. and Sheppard, R. C., Solid Phase Peptide Synthesis: A Practical Approach, pp. 13-23, (IRL Press 1989). The chlorine can be modified to an amine by reaction with anhydrous ammonia.” The polymeric material may be comprised of or consist essentially of polystyrene.

[0513] As is also disclosed in U.S. Pat. No. 5,470,307, “Polyolefins (polypropylene or polyethylene) require different approaches because they contain primarily a carbon backbone offering no native functional groups. One suitable approach is to add carboxyls to the surface by oxidizing with chromic acid followed by nitric acid as described by Ngo, T. T. et al., Kinetics of acetylcholinesterase immobilized on polyethylene tubing, Can. J. Biochem. 57:1200-1203 (1979). These carboxyls are then converted to amines by reacting successively with thionyl chloride and ethylene diamine. The surface is then reacted with SMBP to produce a maleimide that will react with the sulfhydryl on the photolytic linker 18.” The polymeric material may be comprised of or consist essentially of polyolefin material.

[0514] As is also disclosed in U.S. Pat. No. 5,470,307, “A more direct method is to react the polyolefin surfaces with benzophenone 4-maleimide as described by Odom, O. W. et al, Relaxation Time, Interthiol Distance, and Mechanism of Action of Ribosomal Protein S1, Arch. Biochem Biophys. 230:178-193 (1984), to produce the required group for the sulfhydryl addition to the photolytic linker 18. The benzophenone then links to the polyolefin through exposure to ultraviolet (uv) light. Other methods to derivitize the polyolefin surface include the use of radio frequency glow discharge (RFGD)—also known as plasma discharge—in several different manners to produce an in-depth coating to provide functional groups as well as increasing the effective surface area. Polyethylene oxide (PEO) can be crosslinked to the surface, or polyethylene glycol (PEG) can also be used and the mesh varied by the size of the PEO or PEG. This is discussed more fully by Sheu, M. S., et al., A glow discharge treatment to immobilize poly(ethylene oxide)/poly(propylene oxide) surfactants for wettable and non-fouling biomaterials, J. Adhes. Sci. Tech., 6:995-1009 (1992) and Yasuda, H., Plasma Polymerization, (Academic Press, Inc. 1985). Exposed hydroxyls can be activated by tresylation, also known as trifluoroethyl sulfonyl chloride activation, in the manner described by Nielson, K. and Mosbach, K., Tresyl Chloride-Activated Supports for Enzyme Immobilization (and related articles), Meth. Enzym., 135:65-170 (1987). The function can be converted to amines by addition of ethylene diamine or other aliphatic diamines, and then the usual addition of SMBP will give the required maleimide. Another suitable method is to use RFGD to polymerize acrylic acid or other monomers on the surface of the polyolefin. This surface consisting of carboxyls and other carbonyls is derivitizable with CDI and a diamine to give an amine surface which then can react with SMBP.”

[0515] Referring again to the process described in U.S. Pat. No. 5,470,307, photolytic linkers can be conjugated to the functional groups on substrate layers to form linker-agent complexes. As is disclosed in columns 13-14 of such patent, “Once a particular functionality for the substrate layer 16 has been determined, the appropriate strategy for coupling the photolytic linker 18 can be selected and employed. Several such strategies are set out in the examples which follow. As with selecting a method to expose a functional group on the surface 14 of the substrate layer 16, it is understood that selection of the appropriate strategy for coupling the photolytic linker 18 will depend upon various considerations including the chemical functionality of the substrate layer 16, the particular therapeutic agent 20 to be used, the chemical and physical factors affecting the rate and equilibrium of the particular photolytic release mechanism, the need to minimize any deleterious side-effects that might result (such as the production of antagonistic or harmful chemical biproducts, secondary chemical reactions with adjunct medical instruments including other portions of the catheter 10, unclean leaving groups or other impurities), and the solubility of the material used to fabricate the catheter body 12 or substrate layer 16 in various solvents. More limited strategies are available for the coupling of a 2-nitrophenyl photolytic linker 18. If the active site is 1-ethyl hydrazine used in most caging applications, then the complementary functionality on the therapeutic agent 20 will be a carboxyl, hydroxyl, or phosphate available on many pharmaceutical drugs. If a bromomethyl group is built into the photolytic linker 18, it can accept either a carboxyl or one of many other functional groups, or be converted to an amine which can then be further derivitized. In such a case, the leaving group might not be clean and care must be taken when adopting this strategy for a particular anti-mitotic compound 20. Other strategies include building in an oxycarbonyl in the 1-ethyl position, which can form an urethane with an amine in the anti-mitotic compound 20. In this case, the photolytic process evolves CO2.”

[0516] Referring again to U.S. Pat. No. 5,470,307, after the photolytic linker construct has been prepared, it may be contacted with a coherent laser light source to release the therapeutic agent. Thus, as is disclosed in column 9 of U.S. Pat. No. 5,470,307, “use of a coherent laser light source 26 will be preferable in many applications because the use of one or more discrete wavelengths of light energy that can be tuned or adjusted to the particular photolytic reaction occurring in the photolytic linker 18 will necessitate only the minimum power (wattage) level necessary to accomplish a desired release of the anti-mitotic compound 20. As discussed above, coherent or laser light sources 26 are currently used in a variety of medical procedures including diagnostic and interventional treatment, and the wide availability of laser sources 26 and the potential for redundant use of the same laser source 26 in photolytic release of the therapeutic agent 20 as well as related procedures provides a significant advantage. In addition, multiple releases of different therapeutic agents 20 or multiple-step reactions can be accomplished using coherent light of different wavelengths, intermediate linkages to dye filters may be utilized to screen out or block transmission of light energy at unused or antagonistic wavelengths (particularly cytotoxic or cytogenic wavelengths), and secondary emitters may be utilized to optimize the light energy at the principle wavelength of the laser source 26. In other applications, it may be suitable to use a light source 26 such as a flash lamp operatively connected to the portion of the body 12 of the catheter 10 on which the substrate 16, photolytic linker layer 18, and anti-mitotic compound 20 are disposed. One example would be a mercury flash lamp capable of producing long-wave ultra-violet (uv) radiation within or across the 300-400 nanometer wavelength spectrum. When using either a coherent laser light source 26 or an alternate source 26 such as a flash lamp, it is generally preferred that the light energy be transmitted through at least a portion of the body 12 of the catheter 10 such that the light energy traverses a path through the substrate layer 16 to the photolytic linker layer 18 in order to maximize the proportion of light energy transmitted to the photolytic linker layer 18 and provide the greatest uniformity and reproducibility in the amount of light energy (photons) reaching the photolytic linker layer 18 from a specified direction and nature. Optimal uniformity and reproducibility in exposure of the photolyric linker layer 18 permits advanced techniques such as variable release of the anti-mitotic compound 20 dependent upon the controlled quantity of light energy incident on the substrate layer 16 and photolytic linker layer 18.”

[0517] As is also disclosed in U.S. Pat. No. 5,470,307, “The art pertaining to the transmission of light energy through fiber optic conduits 28 or other suitable transmission or production means to the remote biophysical site is extensively developed. For a fiber optic device, the fiber optic conduit 28 material must be selected to accommodate the wavelengths needed to achieve release of the anti-mitotic compound 20 which will for almost all applications be within the range of 280-400 nanometers. Suitable fiber optic materials, connections, and light energy sources 26 may be selected from those currently available and utilized within the biomedical field. While fiber optic conduit 28 materials may be selected to optimize transmission of light energy at certain selected wavelengths for desired application, the construction of a catheter 10 including fiber optic conduit 28 materials capable of adequate transmission throughout the range of the range of 280-400 nanometers is preferred, since this catheter 10 would be usable with the full compliment of photolytic release mechanisms and therapeutic agents 10. Fabrication of the catheter 10 will therefore depend more upon considerations involving the biomedical application or procedure by which the catheter 10 will be introduced or implanted in the patient, and any adjunct capabilities which the catheter 10 must possess.”

[0518] By way of yet further illustration, and referring to U.S. Pat. No. 5,599,352 (the entire disclosure of which is hereby incorporated by reference into this specification), the polymeric material can comprise fibrin. As is disclosed in column 4 of such patent, “The present invention provides a stent comprising fibrin. The term “fibrin” herein means the naturally occurring polymer of fibrinogen that arises during blood coagulation. Blood coagulation generally requires the participation of several plasma protein coagulation factors: factors XII, XI, IX, X, VIII, VII, V, XIII, prothrombin, and fibrinogen, in addition to tissue factor (factor III), kallikrein, high molecular weight kininogen, Ca+2, and phospholipid. The final event is the formation of an insoluble, cross-linked polymer, fibrin, generated by the action of thrombin on fibrinogen. Fibrinogen has three pairs of polypeptide chains (ALPHA 2—BETA 2—GAMMA 2) covalently linked by disulfide bonds with a total molecular weight of about 340,000. Fibrinogen is converted to fibrin through proteolysis by thrombin. An activation peptide, fibrinopeptide A (human) is cleaved from the amino-terminus of each ALPHA chain; fibrinopeptide B (human) from the amino-terminus of each BETA chain. The resulting monomer spontaneously polymerizes to a fibrin gel. Further stabilization of the fibrin polymer to an insoluble, mechanically strong form, requires cross-linking by factor XIII. Factor XIII is converted to XIIIa by thrombin in the presence of Ca+2. XIIIa cross-links the GAMMA chains of fibrin by transglutaminase activity, forming EPSILON-(GAMMA-glutamyl) lysine cross-links. The ALPHA chains of fibrin also may be secondarily cross-linked by transamidation.”

[0519] As is also disclosed in U.S. Pat. No. 5,599,352, “Since fibrin blood clots are naturally subject to fibrinolysis as part of the body's repair mechanism, implanted fibrin can be rapidly biodegraded. Plasminogen is a circulating plasma protein that is adsorbed onto the surface of the fibrin polymer. The adsorbed plasminogen is converted to plasmin by plasminogen activator released from the vascular endothelium. The plasmin will then break down the fibrin into a collection of soluble peptide fragments.”

[0520] As is also disclosed in U.S. Pat. No. 5,599,352, “Methods for making fibrin and forming it into implantable devices are well known as set forth in the following patents and published applications which are hereby incorporated by reference. In U.S. Pat. No. 4,548,736 issued to Muller et al., fibrin is clotted by contacting fibrinogen with a fibrinogen-coagulating protein such as thrombin, reptilase or ancrod. Preferably, the fibrin in the fibrin-containing stent of the present invention has Factor XIII and calcium present during clotting, as described in U.S. Pat. No. 3,523,807 issued to Gerendas, or as described in published European Patent Application 0366564, in order to improve the mechanical properties and biostability of the implanted device. Also preferably, the fibrinogen and thrombin used to make fibrin in the present invention are from the same animal or human species as that in which the stent of the present invention will be implanted in order to avoid cross-species immune reactions. The resulting fibrin can also be subjected to heat treatment at about 150° C. for 2 hours in order to reduce or eliminate antigenicity. In the Muller patent, the fibrin product is in the form of a fine fibrin film produced by casting the combined fibrinogen and thrombin in a film and then removing moisture from the film osmotically through a moisture permeable membrane. In the European Patent Application 0366564, a substrate (preferably having high porosity or high affinity for either thrombin or fibrinogen) is contacted with a fibrinogen solution and with a thrombin solution. The result is a fibrin layer formed by polymerization of fibrinogen on the surface of the device. Multiple layers of fibrin applied by this method could provide a fibrin layer of any desired thickness. Or, as in the Gerendas patent, the fibrin can first be clotted and then ground into a powder which is mixed with water and stamped into a desired shape in a heated mold. Increased stability can also be achieved in the shaped fibrin by contacting the fibrin with a fixing agent such as glutaraldehyde or formaldehyde. These and other methods known by those skilled in the art for making and forming fibrin may be used in the present invention.”

[0521] As is also disclosed in U.S. Pat. No. 5,599,352, “Preferably, the fibrinogen used to make the fibrin is a bacteria-free and virus-free fibrinogen such as that described in U.S. Pat. No. 4,540,573 to Neurath et al which is hereby incorporated by reference. The fibrinogen is used in solution with a concentration between about 10 and 50 mg/ml and with a pH of about 5.8-9.0 and with an ionic strength of about 0.05 to 0.45. The fibrinogen solution also typically contains proteins and enzymes such as albumin, fibronectin (0-300 μg per ml fibrinogen), Factor XIII (0-20 μg per ml fibrinogen), plasminogen (0-210 μg per ml fibrinogen), antiplasmin (0-61 μg per ml fibrinogen) and Antithrombin III (0-150 μg per ml fibrinogen). The thrombin solution added to make the fibrin is typically at a concentration of 1 to 120 NIH units/ml with a preferred concentration of calcium ions between about 0.02 and 0.2M.”

[0522] As is also disclosed in U.S. Pat. No. 5,599,352, “Polymeric materials can also be intermixed in a blend or co-polymer with the fibrin to produce a material with the desired properties of fibrin with improved structural strength. For example, the polyurethane material described in the article by Soldani et at., “Bioartificial Polymeric Materials Obtained from Blends of Synthetic Polymers with Fibrin and Collagen” International Journal of Artificial Organs, Vol. 14, No. 5, 1991, which is incorporated herein by reference, could be sprayed onto a suitable stent structure. Suitable polymers could also be biodegradable polymers such as polyphosphate ester, polyhydroxybutyrate valerate, polyhydroxybutyrate-co-hydroxyvalerate and the like . . . ” The polymeric material 14 may be, e.g., a blend of fibrin and another polymeric material.

[0523] As is also disclosed in U.S. Pat. No. 5,599,352, “The shape for the fibrin can be provided by molding processes. For example, the mixture can be formed into a stent having essentially the same shape as the stent shown in U.S. Pat. No. 4,886,062 issued to Wiktor. Unlike the method for making the stent disclosed in Wiktor which is wound from a wire, the stent made with fibrin can be directly molded into the desired open-ended tubular shape.”

[0524] As is also disclosed in U.S. Pat. No. 5,599,352, “In U.S. Pat. No. 4,548,736 issued to Muller et al., a dense fibrin composition is disclosed which can be a bioabsorbable matrix for delivery of drugs to a patient. Such a fibrin composition can also be used in the present invention by incorporating a drug or other therapeutic substance useful in diagnosis or treatment of body lumens to the fibrin provided on the stent. The drug, fibrin and stent can then be delivered to the portion of the body lumen to be treated where the drug may elute to affect the course of restenosis in surrounding luminal tissue. Examples of drugs that are thought to be useful in the treatment of restenosis are disclosed in published international patent application WO9112779 “Intraluminal Drug Eluting Prosthesis” which is incorporated herein by reference. Therefore, useful drugs for treatment of restenosis and drugs that can be incorporated in the fibrin and used in the present invention can include drugs such as anticoagulant drugs, antiplatelet drugs, antimetabolite drugs, anti-inflammatory drugs and antimitotic drugs. Further, other vasoreactive agents such as nitric oxide releasing agents could also be used. Such therapeutic substances can also be microencapsulated prior to their inclusion in the fibrin. The micro-capsules then control the rate at which the therapeutic substance is provided to the blood stream or the body lumen. This avoids the necessity for dehydrating the fibrin as set forth in Muller et al., since a dense fibrin structure would not be required to contain the therapeutic substance and limit the rate of delivery from the fibrin. For example, a suitable fibrin matrix for drug delivery can be made by adjusting the pH of the fibrinogen to below about pH 6.7 in a saline solution to prevent precipitation (e.g., NACl, CaCl, etc.), adding the microcapsules, treating the fibrinogen with thrombin and mechanically compressing the resulting fibrin into a thin film. The microcapsules which are suitable for use in this invention are well known. For example, the disclosures of U.S. Pat. Nos. 4,897,268, 4,675,189; 4,542,025; 4,530,840; 4,389,330; 4,622,244; 4,464,317; and 4,943,449 could be used and are incorporated herein by reference. Alternatively, in a method similar to that disclosed in U.S. Pat. No. 4,548,736 issued to Muller et al., a dense fibrin composition suitable for drug delivery can be made without the use of microcapsules by adding the drug directly to the fibrin followed by compression of the fibrin into a sufficiently dense matrix that a desired elution rate for the drug is achieved. In yet another method for incorporating drugs which allows the drug to elute at a controlled rate, a solution which includes a solvent, a polymer dissolved in the solvent and a therapeutic drug dispersed in the solvent is applied to the structural elements of the stent and then the solvent is evaporated. Fibrin can then be added over the coated structural elements in an adherent layer. The inclusion of a polymer in intimate contact with a drug on the underlying stent structure allows the drug to be retained on the stent in a resilient matrix during expansion of the stent and also slows the administration of drug following implantation. The method can be applied whether the stent has a metallic or polymeric surface. The method is also an extremely simple method since it can be applied by simply immersing the stent into the solution or by spraying the solution onto the stent. The amount of drug to be included on the stent can be readily controlled by applying multiple thin coats of the solution while allowing it to dry between coats. The overall coating should be thin enough so that it will not significantly increase the profile of the stent for intravascular delivery by catheter. It is therefore preferably less than about 0.002 inch thick and most preferably less than 0.001 inch thick. The adhesion of the coating and the rate at which the drug is delivered can be controlled by the selection of an appropriate bioabsorbable or biostable polymer and by the ratio of drug to polymer in the solution. By this method, drugs such as glucocorticoids (e.g. dexamethasone, betamethasone), heparin, hirudin, tocopherol, angiopeptin, aspirin, ACE inhibitors, growth factors, oligonucleotides, and, more generally, antiplatelet agents, anticoagulant agents, antimitotic agents, antioxidants, antimetabolite agents, and anti-inflammatory agents can be applied to a stent, retained on a stent during expansion of the stent and elute the drug at a controlled rate. The release rate can be further controlled by varying the ratio of drug to polymer in the multiple layers. For example, a higher drug-to-polymer ratio in the outer layers than in the inner layers would result in a higher early dose which would decrease over time. Examples of some suitable combinations of polymer, solvent and therapeutic substance are set forth in Table 1 below . . . . ”

[0525] At column 7 of U.S. Pat. No. 5,599,352, some polymers that can be mixed with the fibrin are discussed. It is disclosed that: “The polymer used can be a bioabsorbable or biostable polymer. Suitable bioabsorbable polymers include poly(L-lactic acid), poly(lactide-co-glycolide) and poly(hydroxybutyrate-co-valerate). Suitable biostable polymers include silicones, polyurethanes, polyesters, vinyl homopolymers and copolymers, acrylate homopolymers and copolymers, polyethers and cellulosics. A typical ratio of drug to dissolved polymer in the solution can vary widely (e.g. in the range of about 10:1 to 1:100). The fibrin is applied by molding a polymerization mixture of fibrinogen and thrombin onto the composite as described herein.” The polymeric material 14 may be, e.g., a blend of fibrin and a bioabsorbable and/or biostable polymer.

[0526] By way of yet further illustration, and referring to U.S. Pat. No. 5,605,696, the polymeric material can be a multi-layered polymeric material, and/or a porous polymeric material. Thus, e.g., and as is disclosed in claim 25 of such patent, “A polymeric material containing a therapeutic drug for application to an intravascular stent for carrying and delivering said therapeutic drug within a blood vessel in which said intravascular stent is placed, comprising: a polymeric material having a thermal processing temperature no greater than about 100° C.; particles of a therapeutic drug incorporated in said polymeric material; and a porosigen uniformly dispersed in said polymeric material, said porosigen being selected from the group consisting of sodium chloride, lactose, sodium heparin, polyethylene glycol, copolymers of polyethylene oxide and polypropylene oxide, and mixtures thereof.” The “porsigen” is described at columns 4 and 5 of the patent, wherein it is disclosed that: “porosigen can also be incorporated in the drug loaded polymer by adding the porosigen to the polymer along with the therapeutic drug to form a porous, drug loaded polymeric membrane. A porosigen is defined herein for purposes of this application as any moiety, such as microgranules of sodium chloride, lactose, or sodium heparin, for example, which will dissolve or otherwise be degraded when immersed in body fluids to leave behind a porous network in the polymeric material. The pores left by such porosigens can typically be a large as 10 microns. The pores formed by porosigens such as polyethylene glycol (PEG), polyethylene oxide/polypropylene oxide (PEO/PPO) copolymers, for example, can also be smaller than one micron, although other similar materials which form phase separations from the continuous drug loaded polymeric matrix and can later be leached out by body fluids can also be suitable for forming pores smaller than one micron. While it is currently preferred to apply the polymeric material to the structure of a stent while the therapeutic drug and porosigen material are contained within the polymeric material, to allow the porosigen to be dissolved or degraded by body fluids when the stent is placed in a blood vessel, alternatively the porosigen can be dissolved and removed from the polymeric material to form pores in the polymeric material prior to placement of the polymeric material combined with the stent within a blood vessel. If desired, a rate-controlling membrane can also be applied over the drug loaded polymer, to limit the release rate of the therapeutic drug. Such a rate-controlling membrane can be useful for delivery of water soluble substances where a nonporous polymer film would completely prevent diffusion of the drug. The rate-controlling membrane can be added by applying a coating from a solution, or a lamination, as described previously. The rate-controlling membrane applied over the polymeric material can be formed to include a uniform dispersion of a porosigen in the rate-controlling membrane, and the porosigen in the rate-controlling membrane can be dissolved to leave pores in the rate-controlling membrane typically as large as 10 microns, or as small as 1 micron, for example, although the pores can also be smaller than 1 micron. The porosigen in the rate-controlling membrane can be, for example, sodium chloride, lactose, sodium heparin, polyethylene glycol, polyethylene oxide/polypropylene oxide copolymers, and mixtures thereof.” The polymeric material 14 may comprise a multiplicity of layers of polymeric material.

[0527] By way of yet further illustration, and referring to U.S. Pat. No. 5,700,286 (the entire disclosure of which is hereby incorporated by reference into this specification), the polymeric material may be either a thermoplastic or an elastomeric polymer. Thus, and referring to columns 5 and 6 of such patent, “The polymeric material is preferably selected from thermoplastic and elastomeric polymers. In one currently preferred embodiment the polymeric material can be a material available under the trade name “C-Flex” from Concept Polymer Technologies of Largo, Fla. In another currently preferred embodiment, the polymeric material can be ethylene vinyl acetate (EVA); and in yet another currently preferred embodiment, the polymeric material can be a material available under the trade name “BIOSPAN.” Other suitable polymeric materials include latexes, urethanes, polysiloxanes, and modified styrene-ethylene/butylene-styrene block copolymers (SEBS) and their associated families, as well as elastomeric, bioabsorbable, linear aliphatic polyesters. The polymeric material can typically have a thickness in the range of about 0.002 to about 0.020 inches, for example. The polymeric material is preferably bioabsorbable, and is preferably loaded or coated with a anti-mitotic compounder drug, including, but not limited to, antiplatelets, antithrombins, cytostatic and antiproliferative agents, for example, to reduce or prevent restenosis in the vessel being treated.”

[0528] By way of yet further illustration, and referring to U.S. Pat. No. 6,004,346 (the entire disclosure of which is hereby incorporated by reference into this specification), the polymeric material may be a bioabsorbable polymer. Thus, and referring to column 7 of such patent, “controlled release, via a bioabsorbable polymer, offers to maintain the drug level within the desired therapeutic range for the duration of the treatment. In the case of stents, the prosthesis materials will maintain vessel support for at least two weeks or until incorporated into the vessel wall even with bioabsorbable, biodegradable polymer constructions.”

[0529] As is also disclosed in U.S. Pat. No. 6,004,346 “Several polymeric compounds that are known to be bioabsorbable and hypothetically have the ability to be drug impregnated may be useful in prosthesis formation herein. These compounds include: poly-1-lactic acid/polyglycolic acid, polyanhydride, and polyphosphate ester. A brief description of each is given below.”

[0530] As is also disclosed in U.S. Pat. No. 6,004,346, “Poly-1-lactic acid/polyglycolic acid has been used for many years in the area of bioabsorbable sutures. It is currently available in many forms, i.e., crystals, fibers, blocks, plates, etc. . . . ”

[0531] As is also disclosed in U.S. Pat. No. 6,004,346, “Another compound which could be used are the polyanhydrides. They are currently being used with several chemotherapy drugs for the treatment of cancerous tumors. These drugs are compounded into the polymer which is molded into a cube-like structure and surgically implanted at the tumor site . . . ”

[0532] As is also disclosed in U.S. Pat. No. 6,004,346, “The compound which is preferred is a polyphosphate ester. Polyphosphate ester is a compound such as that disclosed in U.S. Pat. Nos. 5,176,907; 5,194,581; and 5,656,765 issued to Leong which are incorporated herein by reference. Similar to the polyanhydrides, polyphoshate ester is being researched for the sole purpose of drug delivery. Unlike the polyanhydrides, the polyphosphate esters have high molecular weights (600,000 average), yielding attractive mechanical properties. This high molecular weight leads to transparency, and film and fiber properties. It has also been observed that the phosphorous-carbon-oxygen plasticizing effect, which lowers the glass transition temperature, makes the polymer desirable for fabrication.”

[0533] As is also disclosed in U.S. Pat. No. 6,004,346, “The basic structure of polyphosphate ester monomer is shown below . . . where P corresponds to Phosphorous, O corresponds to Oxygen, and R and R1 are functional groups. Reaction with water leads to the breakdown of this compound into monomeric phosphates (phosphoric acid) and diols (see below). [Figure] It is the hydrolytic instability of the phosphorous ester bond which makes this polymer attractive for controlled drug release applications. A wide range of controllable degradation rates can be obtained by adjusting the hydrophobicities of the backbones of the polymers and yet assure biodegradability. The functional side groups allow for the chemical linkage of drug molecules to the polymer . . . the drug may also be incorporated into the backbone of the polymer.”

[0534] By way of further illustration, and referring to U.S. Pat. No. 6,120,536 (the entire disclosure of which is hereby incorporated by reference into this specification), the polymeric material may comprise a hydrophobic elastomeric material incorporating an amount of anti-mitotic compound therein for timed release. Some of these elastomeric materials are described at columns 5 and 6 of such patent, wherein it is disclosed that: “The elastomeric materials that form the stent coating underlayers should possess certain properties. Preferably the layers should be of suitable hydrophobic biostable elastomeric materials which do not degrade. Surface layer material should minimize tissue rejection and tissue inflammation and permit encapsulation by tissue adjacent the stent implantation site. Exposed material is designed to reduce clotting tendencies in blood contacted and the surface is preferably modified accordingly. Thus, underlayers of the above materials are preferably provided with a fluorosilicone outer coating layer which may or may not contain imbedded bioactive material, such as heparin. Alternatively, the outer coating may consist essentially of polyethylene glycol (PEG), polysaccharides, phospholipids, or combinations of the foregoing.”

[0535] As is also disclosed in U.S. Pat. No. 6,120,536 “Polymers generally suitable for the undercoats or underlayers include silicones (e.g., polysiloxanes and substituted polysiloxanes), polyurethanes, thermoplastic elastomers in general, ethylene vinyl acetate copolymers, polyolefin elastomers, polyamide elastomers, and EPDM rubbers. The above-referenced materials are considered hydrophobic with respect to the contemplated environment of the invention. Surface layer materials include fluorosilicones and polyethylene glycol (PEG), polysaccharides, phospholipids, and combinations of the foregoing.”

[0536] As is also disclosed in U.S. Pat. No. 6,120,536, “Various combinations of polymer coating materials can be coordinated with biologically active species of interest to produce desired effects when coated on stents to be implanted in accordance with the invention. Loadings of therapeutic materials may vary. The mechanism of incorporation of the biologically active species into the surface coating and egress mechanism depend both on the nature of the surface coating polymer and the material to be incorporated. The mechanism of release also depends on the mode of incorporation. The material may elute via interparticle paths or be administered via transport or diffusion through the encapsulating material itself.”

[0537] By way of yet further illustration, and referring to U.S. Pat. No. 6,159,488 (the entire disclosure of which is hereby incorporated by reference into this specification), the polymeric material may be a biopolymer that is non-degradable and is insoluble in biological mediums. Thus, and as is disclosed at column 8 of this patent, “The polymer carrier can be any pharmaceutically acceptable biopolymer that is non-degradable and insoluble in biological mediums, has good stability in a biological environment, has a good adherence to the selected stent, is flexible, and that can be applied as coating to the surface of a stent, either from an organic solvent, or by a melt process. The hydrophilicity or hydrophobicity of the polymer carrier will determine the release rate of halofuginone from the stent surface . . . The coating may include other antiproliferative agents, such as heparin, steroids and non-steroidal anti-inflammatory agents. To improve the blood compatibility of the coated stent, a hydrophilic coating such as hydromer-hydrophilic polyurethane can be applied. A material for delivering a biologically active compound comprising a solid carrier material having dissolved and/or dispersed therein at least two biologically active compounds, each of said at least two biologically active compounds having a biologically active nucleus which is common to each of the biologically active compounds, and the at least two biologically active compounds having maximum solubility levels in a single solvent which differ from each other by at least 10% by weight; wherein said solid carrier comprises a biocompatible polymeric material.”

[0538] By way of yet further illustration, and referring to claim 1 of U.S. Pat. No. 6,168,801 (the entire disclosure of which is hereby incorporated by reference into this specification), the polymeric material may comprise “A material for delivering a biologically active compound comprising a solid carrier material having dissolved and/or dispersed therein at least two biologically active compounds, each of said at least two biologically active compounds having a biologically active nucleus which is common to each of the biologically active compounds, and the at least two biologically active compounds having maximum solubility levels in a single solvent which differ from each other by at least 10% by weight; wherein said solid carrier comprises a biocompatible polymeric material.”

[0539] The device of U.S. Pat. No. 6,168,801 preferably comprises at least two forms of a biologically active ingredient in a single polymeric matrix. Thus, and as is disclosed at column 6 of the patent, “It is contemplated in the practice of the present invention that the combination of the at least two forms of the biologically active ingredient or medically active ingredient in at least a single polymeric carrier can provide release of the active ingredient nucleus common to the at least two forms. The release of the active nucleus can be accomplished by, for example, enzymatic hydrolysis of the forms upon release from the carrier device. Further, the combination of the at least two forms of the biologically active ingredient or medically active ingredient in at least a single polymeric carrier can provide net active ingredient release characterized by the at least simple combination of the two matrix forms described above. This point is illustrated in FIG. 1 which compares the in vitro release of dexamethasone from matrices containing various fractions of two forms of the synthetic steroid dexamethasone, dexamethasone sodium phosphate (DSP; hydrophilic) and dexamethasone acetate (DA; hydrophobic). It is easy to see from these results that the release of dexamethasone acetate (specifically, 100% DA) is slower than all other matrices tested containing some degree or loading of dexamethasone sodium phosphate (hydrophilic). Still further, the resulting active ingredient release from the combined form matrix should be at least more rapid in the early stages of release than the slow single active ingredient component alone. Further still, the cumulative active ingredient release from the combined form matrix should be at least greater in the chronic stages than the fast single active ingredient component. Once again from FIG. 1, the two test matrices containing the greatest amount of dexamethasone sodium phosphate (specifically, 100% DSP, and 75% DSP/25% DA) began to slow in release as pointed out at points “A” and “B”. And further still, the optimal therapeutic release can be designed through appropriate combination of the at least two active biological or medical ingredients in the polymeric carrier material. If as in this example, rapid initial release as well as continuous long term release is desired to achieve a therapeutic goal, the matrix composed of 50% DSP/50% DA would be selected.”

[0540] By way of yet further illustration, and referring to claim 1 of U.S. Pat. No. 6,395,300 (the entire disclosure of which is hereby incorporated by reference into this specification), the polymeric material may be a porous polymeric matrix made by a process comprising the steps of: “a) dissolving a drug in a volatile organic solvent to form a drug solution, (b) combining at least one volatile pore forming agent with the volatile organic drug solution to form an emulsion, suspension, or second solution, and (c) removing the volatile organic solvent and volatile pore forming agent from the emulsion, suspension, or second solution to yield the porous matrix comprising drug, wherein the porous matrix comprising drug has a tap density of less than or equal to 1.0 g/mL or a total surface area of greater than or equal to 0.2 m2/g.”

[0541] The anti-mitotic compound may be derived from an anti-microtuble agent. As is disclosed in U.S. Pat. No. 6,689,803 (at columns 5-6), representative anti-microtubule agents include, e.g., “ . . . . taxanes (e.g., paclitaxel and docetaxel), campothecin, eleutherobin, sarcodictyins, epothilones A and B, discodermolide, deuterium oxide (D2O), hexylene glycol (2-methyl-2,4-pentanediol), tubercidin (7-deazaadenosine), LY290181 (2-amino-4-(3-pyridyl)-4H-naphtho(1,2-b)pyran-3-cardonitrile), aluminum fluoride, ethylene glycol bis-(succinimidylsuccinate), glycine ethyl ester, nocodazole, cytochalasin B, colchicine, colcemid, podophyllotoxin, benomyl, oryzalin, majusculamide C, demecolcine, methyl-2-benzimidazolecarbamate (MBC), LY195448, subtilisin, 1069C85, steganacin, combretastatin, curacin, estradiol, 2-methoxyestradiol, flavanol, rotenone, griseofulvin, vinca alkaloids, including vinblastine and vincristine, maytansinoids and ansamitocins, rhizoxin, phomopsin A, ustiloxins, dolastatin 10, dolastatin 15, halichondrins and halistatins, spongistatins, cryptophycins, rhazinilam, betaine, taurine, isethionate, HO-221, adociasulfate-2, estramustine, monoclonal anti-idiotypic antibodies, microtubule assembly promoting protein (taxol-like protein, TALP), cell swelling induced by hypotonic (190 mosmol/L) conditions, insulin (100 nmol/L) or glutamine (10 mmol/L), dynein binding, gibberelin, XCHO1 (kinesin-like protein), lysophosphatidic acid, lithium ion, plant cell wall components (e.g., poly-L-lysine and extensin), glycerol buffers, Triton X-100 microtubule stabilizing buffer, microtubule associated proteins (e.g., MAP2, MAP4, tau, big tau, ensconsin, elongation factor-1-alpha (EF-1.alpha.) and E-MAP-115), cellular entities (e.g., histone H1, myelin basic protein and kinetochores), endogenous microtubular structures (e.g., axonemal structures, plugs and GTP caps), stable tubule only polypeptide (e.g., STOP145 and STOP220) and tension from mitotic forces, as well as any analogues and derivatives of any of the above. Within other embodiments, the anti-microtubule agent is formulated to further comprise a polymer.”

[0542] The term “anti-microtubule,” as used in this specification (and in the specification of U.S. Pat. No. 6,689,803), refers to any “ . . . protein, peptide, chemical, or other molecule which impairs the function of microtubules, for example, through the prevention or stabilization of polymerization. A wide variety of methods may be utilized to determine the anti-microtubule activity of a particular compound, including for example, assays described by Smith et al. (Cancer Lett 79(2):213-219, 1994) and Mooberry et al., (Cancer Lett. 96(2):261-266, 1995);” see, e.g., lines 13-21 of column 14 of U.S. Pat. No. 6,689,803.

[0543] An extensive listing of anti-microtubule agents is provided in columns 14,15, 16, and 17 of U.S. Pat. No. 6,689,803; and one or more of them may be disposed within the polymeric material together with and/or instead of the anti-mitotic compound of this invention. In one embodiment, these prior art anti-microtubule agents are made magnetic in accordance with the process described earlier in this specification.

[0544] These prior art anti-microtubule agents, which may be used to prepare the anti-mitotic compounds of this invention, include “ . . . taxanes (e.g., paclitaxel (discussed in more detail below) and docetaxel) (Schiff et al., Nature 277: 665-667, 1979; Long and Fairchild, Cancer Research 54: 4355-4361, 1994; Ringel and Horwitz, J. Natl. Cancer Inst. 83(4): 288-291,1991; Pazdur et al., Cancer Treat. Rev. 19(4): 351-386, 1993), campothecin, eleutherobin (e.g., U.S. Pat. No. 5,473,057), sarcodictyins (including sarcodictyin A), epothilones A and B (Bollag et al., Cancer Research 55: 2325-2333, 1995), discodermolide (ter Haar et al., Biochemistry 35: 243-250, 1996), deuterium oxide (D2O) (James and Lefebvre, Genetics 130(2): 305-314, 1992; Solloft et al., J. Clin. Invest. 95: 1869-1876, 1995), hexylene glycol (2-methyl-2,4-pentanediol) (Oka et al., Cell Struct. Funct. 16(2): 125-134, 1991), tubercidin (7-deazaadenosine) (Mooberry et al., Cancer Lett. 96(2): 261-266, 1995), LY290181 (2-amino-4-(3-pyridyl)-4H-naphtho(1,2-b)pyran-3-cardonitrile) (Panda et al., J. Biol. Chem. 272(12): 7681-7687, 1997; Wood et al., Mol. Pharmacol. 52(3): 437-444, 1997), aluminum fluoride (Song et al., J. Cell. Sci. Suppl. 14: 147-150, 1991), ethylene glycol bis-(succinimidylsuccinate) (Caplow and Shanks, J. Biol. Chem. 265(15): 8935-8941, 1990), glycine ethyl ester (Mejillano et al., Biochemistry 31(13): 3478-3483, 1992), nocodazole (Ding et al., J. Exp. Med. 171(3): 715-727, 1990; Dotti et al., J. Cell Sci. Suppl. 15: 75-84, 1991; Oka et al., Cell Struct. Funct. 16(2): 125-134, 1991; Weimer et al., J. Cell. Biol. 136(1), 71-80, 1997), cytochalasin B (Illinger et al., Biol. Cell 73(2-3): 131-138, 1991), colchicine and Cl 980 (Allen et al., Am. J. Physiol. 261(4 Pt. 1): L315-L321, 1991; Ding et al., J. Exp. Med. 171(3): 715-727, 1990; Gonzalez et al., Exp. Cell. Res. 192(1): 10-15, 1991; Stargell et al., Mol. Cell. Biol. 12(4): 1443-1450, 1992; Garcia et al., Antican. Drugs 6(4): 533-544, 1995), colcemid (Barlow et al., Cell. Motil. Cytoskeleton 19(1): 9-17, 1991; Meschini et al., J. Microsc. 176(Pt. 3): 204-210, 1994; Oka et al., Cell Struct. Funct. 16(2): 125-134, 1991), podophyllotoxin (Ding et al., J. Exp. Med. 171(3): 715-727, 1990), benomyl (Hardwick et al., J. Cell. Biol. 131(3): 709-720, 1995; Shero et al., Genes Dev. 5(4): 549-560, 1991), oryzalin (Stargell et al., Mol. Cell. Biol. 12(4): 1443-1450, 1992), majusculamide C (Moore, J. Ind. Microbiol. 16(2): 134-143, 1996), demecolcine (Van Dolah and Ramsdell, J. Cell. Physiol. 166(1): 49-56, 1996; Wiemer et al., J. Cell. Biol. 136(1): 71-80, 1997), methyl-2-benzimidazolecarbamate (MBC) (Brown et al., J. Cell. Biol. 123(2): 387-403, 1993), LY195448 (Barlow & Cabral, Cell Motil. Cytoskel. 19: 9-17, 1991), subtilisin (Saoudi et al., J. Cell Sci. 108: 357-367, 1995), 1069C85 (Raynaud et al., Cancer Chemother. Pharmacol. 35: 169-173, 1994), steganacin (Hamel, Med. Res. Rev. 16(2): 207-231, 1996), combretastatins (Hamel, Med. Res. Rev. 16(2): 207-231, 1996), curacins (Hamel, Med. Res. Rev. 16(2): 207-231, 1996), estradiol (Aizu-Yokata et al., Carcinogen. 15(9): 1875-1879, 1994), 2-methoxyestradiol (Hamel, Med. Res. Rev. 16(2): 207-231, 1996), flavanols (Hamel, Med. Res. Rev. 16(2): 207-231, 1996), rotenone (Hamel, Med. Res. Rev. 16(2): 207-231, 1996), griseofulvin (Hamel, Med. Res. Rev. 16(2): 207-231; 1996), vinca alkaloids, including vinblastine and vincristine (Ding et al., J. Exp. Med. 171(3): 715-727, 1990; Dirk et al., Neurochem. Res. 15(11): 1135-1139, 1990; Hamel, Med. Res. Rev. 16(2): 207-231, 1996; Illinger et al., Biol. Cell 73(2-3): 131-138, 1991; Wiemer et al., J. Cell. Biol. 136(1): 71-80, 1997), maytansinoids and ansamitocins (Hamel, Med. Res. Rev. 16(2): 207-231, 1996), rhizoxin (Hamel, Med. Res. Rev. 16(2): 207-231, 1996), phomopsin A (Hamel, Med. Res. Rev. 16(2): 207-231, 1996), ustiloxins (Hamel, Med. Res. Rev. 16(2): 207-231, 1996), dolastatin 10 (Hamel, Med Res. Rev. 16(2): 207-231, 1996), dolastatin 15 (Hamel, Med. Res. Rev. 16(2): 207-231, 1996), halichondrins and halistatins (Hamel, Med. Res. Rev. 16(2): 207-231, 1996), spongistatins (Hamel, Med. Res. Rev. 16(2): 207-231, 1996), cryptophycins (Hamel, Med. Res. Rev. 16(2): 207-231, 1996), rhazinilam (Hamel, Med. Res. Rev. 16(2): 207-231, 1996), betaine (Hashimoto et al., Zool. Sci. 1: 195-204, 1984), taurine (Hashimoto et al., Zool. Sci. 1: 195-204, 1984), isethionate (Hashimoto et al., Zool. Sci. 1: 195-204, 1984), HO-221 (Ando et al., Cancer Chemother. Pharmacol. 37: 63-69, 1995), adociasulfate-2 (Sakowicz et al., Science 280: 292-295, 1998), estramustine (Panda et al., Proc. Natl. Acad. Sci. USA 94: 10560-10564, 1997), monoclonal anti-idiotypic antibodies (Leu et al., Proc. Natl. Acad. Sci. USA 91(22): 10690-10694, 1994), microtubule assembly promoting protein (taxol-like protein, TALP) (Hwang et al., Biochem. Biophys. Res. Commun. 208(3): 1174-1180, 1995), cell swelling induced by hypotonic (190 mosmol/L) conditions, insulin (100 nmol/L) or glutamine (10 mmol/L) (Haussinger et al., Biochem. Cell. Biol. 72(1-2): 12-19, 1994), dynein binding (Ohba et al., Biochim. Biophys. Acta 1158(3): 323-332, 1993), gibberelin (Mita and Shibaoka, Protoplasma 119(½): 100-109, 1984), XCHO1 kinesin-like protein) (Yonetani et al., Mol. Biol. Cell 7(suppl): 211A, 1996), lysophosphatidic acid (Cook et al., Mol. Biol. Cell 6(suppl): 260A, 1995), lithium ion (Bhattacharyya and Wolff, Biochem. Biophys. Res. Commun. 73(2): 383-390, 1976), plant cell wall components (e.g., poly-L-lysine and extensin) (Akashi et al., Planta 182(3): 363-369, 1990), glycerol buffers (Schilstra et al., Biochem. J. 277(Pt. 3): 839-847, 1991; Farrell and Keates, Biochem. Cell. Biol. 68(11): 1256-1261, 1990; Lopez et al., J. Cell. Biochem. 43(3): 281-291, 1990), Triton X-100 microtubule stabilizing buffer (Brown et al., J. Cell Sci. 104(Pt. 2): 339-352, 1993; Safiejko-Mroczka and Bell, J. Histochem. Cytochem. 44(6): 641-656, 1996), microtubule associated proteins (e.g., MAP2, MAP4, tau, big tau, ensconsin, elongation factor-1-alpha EF-1.alpha.) and E-MAP-115) (Burgess et al., Cell Motil. Cytoskeleton 20(4): 289-300, 1991; Saoudi et al., J. Cell. Sci. 108(Pt. 1): 357-367, 1995; Bulinski and Bossler, J. Cell. Sci. 107(Pt. 10): 2839-2849, 1994; Ookata et al., J. Cell Biol. 128(5): 849-862, 1995; Boyne et al., J. Comp. Neurol. 358(2): 279-293, 1995; Ferreira and Caceres, J. Neurosci. 11 (2): 392400, 1991; Thurston et al., Chromosoma 105(1): 20-30, 1996; Wang et al., Brain Res. Mol. Brain Res. 38(2): 200-208, 1996; Moore and Cyr, Mol. Biol. Cell 7(suppl): 221-A, 1996; Masson and Kreis, J. Cell Biol. 123(2), 357-371, 1993), cellular entities (e.g. histone H1, myelin basic protein and kinetochores) (Saoudi et al., J. Cell. Sci. 108(Pt. 1): 357-367, 1995; Simerly et al., J. Cell Biol. 111(4): 1491-1504, 1990), endogenous microtubular structures (e.g., axonemal structures, plugs and GTP caps) (Dye et al., Cell Motil. Cytoskeleton 21(3): 171-186, 1992; Azhar and Murphy, Cell Motil. Cytoskeleton 15(3): 156-161, 1990; Walker et al., J. Cell Biol. 114(1): 73-81, 1991; Drechsel and Kirschner, Curr. Biol. 4(12): 1053-1061, 1994), stable tubule only polypeptide (e.g., STOP145 and STOP220) (Pirollet et al., Biochim. Biophys. Acta 1160(1): 113-119, 1992; Pirollet et al., Biochemistry 31(37): 8849-8855, 1992; Bosc et al., Proc. Natl. Acad. Sci. USA 93(5): 2125-2130, 1996; Margolis et al., EMBO J. 9(12): 4095-4102, 1990) and tension from mitotic forces (Nicklas and Ward, J. Cell Biol. 126(5): 1241-1253, 1994), as well as any analogues and derivatives of any of the above. Such compounds can act by either depolymerizing microtubules (e.g., colchicine and vinblastine), or by stabilizing microtubule formation (e.g., paclitaxel).”

[0545] U.S. Pat. No. 6,689,803 also discloses (at columns 16 and 17 that, “Within one preferred embodiment of the invention, the therapeutic agent is is paclitaxel, a compound which disrupts microtubule formation by binding to tubulin to form abnormal mitotic spindles. Briefly, paclitaxel is a highly derivatized diterpenoid (Wani et al., J. Am. Chem. Soc. 93:2325, 1971) which has been obtained from the harvested and dried bark of Taxus brevifolia (Pacific Yew) and Taxomyces Andreanae and Endophytic Fungus of the Pacific Yew (Stierle et al., Science 60:214-216,-1993). “Paclitaxel” (which should be understood herein to include prodrugs, analogues and derivatives such as, for example, TAXOL®, TAXOTERE®), Docetaxel, 10-desacetyl analogues of paclitaxel and 3′N-desbenzoyl-3′N-t-butoxy carbonyl analogues of paclitaxel) may be readily prepared utilizing techniques known to those skilled in the art (see e.g., Schiff et al., Nature 277:665-667, 1979; Long and Fairchild, Cancer Research 54:4355-4361, 1994; Ringel and Horwitz, J. Natl. Cancer Inst. 83(4):288-291, 1991; Pazdur et al., Cancer Treat. Rev. 19(4):351-386, 1993; WO9407882; WO9407881; WO9407880; WO9407876; WO9323555; WO9310076; WO9400156; WO9324476; EP590267; WO9420089; U.S. Pat. Nos. 5,294,637; 5,283,253; 5,279,949; 5,274,137; 5,202,448; 5,200,534; 5,229,529; 5,254,580; 5,412,092; 5,395,850; 5,380,751; 5,350,866; 4,857,653; 5,272,171; 5,411,984; 5,248,796; 5,248,796; 5,422,364; 5,300,638; 5,294,637; 5,362,831; 5,440,056; 4,814,470; 5,278,324; 5,352,805; 5,411,984; 5,059,699; 4,942,184; Tetrahedron Letters 35(52):9709-9712, 1994; J. Med. Chem. 35:4230-4237,1992; J. Med. Chem. 34:992-998,1991; J. Natural Prod. 57(10):1404-1410, 1994; J. Natural Prod. 57(11):1580-1583, 1994; J. Am. Chem. Soc. 110:6558-6560, 1988), or obtained from a variety of commercial sources, including for example, Sigma Chemical Co., St. Louis, Mo. (T7402—from Taxus brevifolia).”

[0546] As is also disclosed in U.S. Pat. No. 6,689,893, “Representative examples of such paclitaxel derivatives or analogues include 7-deoxy-docetaxol, 7,8cyclopropataxanes, N-substituted 2-azetidones, 6,7-epoxy paclitaxels, 6,7-modified paclitaxels, 10-desacetoxytaxol, 10-deacetyltaxol (from 10-deacetylbaccatin III), phosphonooxy and carbonate derivatives of taxol, taxol 2′,7-di(sodium 1,2-benzenedicarboxylate, 10-desacetoxy-11,12-dihydrotaxol-10,12(18)-diene derivatives, 10-desacetoxytaxol, Protaxol(2′- and/or 7-O-ester derivatives), (2′- and/or 7-O-carbonate derivatives), asymmetric synthesis of taxol side chain, fluoro taxols, 9-deoxotaxane, (13-acetyl-9-deoxobaccatine III, 9-deoxotaxol, 7-deoxy-9-deoxotaxol, 10-desacetoxy-7-deoxy-9-deoxotaxol, Derivatives containing hydrogen or acetyl group and a hydroxy and tert-butoxycarbonylamino, sulfonated 2′-acryloyltaxol and sulfonated 2′-O-acyl acid taxol derivatives, succinyltaxol, 2′-.gamma.-aminobutyryltaxol formate, 2′-acetyl taxol, 7-acetyl taxol, 7-glycine carbamate taxol, 2′-OH-7-PEG(5000)carbamate taxol, 2′-benzoyl and 2′,7-dibenzoyl taxol derivatives, other prodrugs (2′-acetyl taxol; 2′,7-diacetyltaxol; 2′succinyltaxol; 2′-(beta-alanyl)-taxol); 2′gamma-aminobutyryltaxol formate; ethylene glycol derivatives of 2′-succinyltaxol; 2′-glutaryltaxol; 2′-(N,N-dimethylglycyl)taxol; 2′-(2-(N,N-dimethylamino)propionyl)taxol; 2′orthocarboxybenzoyl taxol; 2′aliphatic carboxylic acid derivatives of taxol, Prodrugs {2′(N,N-diethylaminopropionyl)taxol, 2′(N,N-dimethylglycyl)taxol, 7(N,N-dimethylglycyl)taxol, 2′,7-di-(N,N-dimethylglycyl)taxol, 7(N,N-diethylaminopropionyl)taxol, 2′,7-di(N,N-diethylaminopropionyl)taxol, 2′-(L-glycyl)taxol, 7-(L-glycyl)taxol, 2′,7-di(L-glycyl)taxol, 2′-(L-alanyl)taxol, 7-(L-alanyl)taxol, 2′,7-di(L-alanyl)taxol, 2′-(L-leucyl)taxol, 7-(L-leucyl)taxol, 2′,7-di(L-leucyl)taxol, 2′-(L-isoleucyl)taxol, 7-(L-isoleucyl)taxol, 2′,7-di(L-isoleucyl)taxol, 2′-(L-valyl)taxol, 7-(L-valyl)taxol, 2′7-di(L-valyl)taxol, 2′-(L-phenylalanyl)taxol, 7-(L-phenylalanyl)taxol, 2′,7-di(L-phenylalanyl)taxol, 2′-(L-prolyl)taxol, 7-(L-prolyl)taxol, 2′,7-di(L-prolyl)taxol, 2′-(L-lysyl)taxol, 7-(L-lysyl)taxol, 2′,7-di(L-lysyl)taxol, 2′-(L-glutamyl)taxol, 7-(L-glutamyl)taxol, 2′,7-di(L-glutamyl)taxol, 2′-(L-arginyl)taxol, 7-(L-arginyl)taxol, 2′,7-di(L-arginyl)taxol}, Taxol analogs with modified phenylisoserine side chains, taxotere, (N-debenzoyl-N-tert-(butoxycaronyl)-10-deacetyltaxol, and taxanes (e.g., baccatin III, cephalomannine, 10-deacetylbaccatin III, brevifoliol, yunantaxusin and taxusin).”

[0547] At columns 17, 18, 19, and 20 of U.S. Pat. No. 6,689,803, several “polymeric carriers” are described. One or more of these “polymeric carriers” may be used as the polymeric material. Thus, and referring to columns 17-20 of such United States patent, “ . . . a wide variety of polymeric carriers may be utilized to contain and/or deliver one or more of the therapeutic agents discussed above, including for example both biodegradable and non-biodegradable compositions. Representative examples of biodegradable compositions include albumin, collagen, gelatin, hyaluronic acid, starch, cellulose (methylcellulose, hydroxypropylcellulose, hydroxypropylmethylcellulose, hydroxyethylcellulose, carboxymethylcellulose, cellulose acetate phthalate, cellulose acetate succinate, hydroxypropylmethylcellulose phthalate), casein, dextrans, polysaccharides, fibrinogen, poly(D,L lactide), poly(D,L-lactide-co-glycolide), poly(glycolide), poly(hydroxybutyrate), poly(alkylcarbonate) and poly(orthoesters), polyesters, poly(hydroxyvaleric acid), polydioxanone, poly(ethylene terephthalate), poly(malic acid), poly(tartronic acid), polyanhydrides, polyphosphazenes, poly(amino acids) and their copolymers (see generally, Illum, L., Davids, S. S. (eds.) “Polymers in Controlled Drug Delivery” Wright, Bristol, 1987; Arshady, J. Controlled Release 17:1-22, 1991; Pitt, Int. J. Phar. 59:173-196, 1990; Holland et al., J. Controlled Release 4:155-0180, 1986). Representative examples of nondegradable polymers include poly(ethylene-vinyl acetate) (“EVA”) copolymers, silicone rubber, acrylic polymers (polyacrylic acid, polymethylacrylic acid, polymethylmethacrylate, polyalkylcynoacrylate), polyethylene, polyproplene, polyamides (nylon 6,6), polyurethane, poly(ester urethanes), poly(ether urethanes), poly(ester-urea), polyethers (poly(ethylene oxide), poly(propylene oxide), Pluronics and poly(tetramethylene glycol)), silicone rubbers and vinyl polymers (polyvinylpyrrolidone, poly(vinyl alcohol), poly(vinyl acetate phthalate). Polymers may also be developed which are either anionic (e.g. alginate, carrageenin, carboxymethyl cellulose and poly(acrylic acid), or cationic (e.g., chitosan, poly-L-lysine, polyethylenimine, and poly (allyl amine)) (see generally, Dunn et al., J. Applied Polymer Sci. 50:353-365, 1993; Cascone et al., J. Materials Sci.: Materials in Medicine 5:770-774, 1994; Shiraishi et al., Biol. Pharm. Bull. 16(11):1164-1168, 1993; Thacharodi and Rao, Int'l J. Pharm. 120:115-118, 1995; Miyazaki et al., Int'l J. Pharm. 118:257-263, 1995). Particularly preferred polymeric carriers include poly(ethylenevinyl acetate), poly (D,L-lactic acid) oligomers and polymers, poly (L-lactic acid) oligomers and polymers, poly (glycolic acid), copolymers of lactic acid and glycolic acid, poly (caprolactone), poly (valerolactone), polyanhydrides, copolymers of poly (caprolactone) or poly (lactic acid) with a polyethylene glycol (e.g., MePEG), and blends thereof.”

[0548] As is also disclosed in U.S. Pat. No. 6,689,893, “Polymeric carriers can be fashioned in a variety of forms, with desired release characteristics and/or with specific desired properties. For example, polymeric carriers may be fashioned to release a anti-mitotic compound upon exposure to a specific triggering event such as pH (see e.g., Heller et al., “Chemically Self-Regulated Drug Delivery Systems,” in Polymers in Medicine III, Elsevier Science Publishers B. V., Amsterdam, 1988, pp. 175-188; Kang et al., J. Applied Polymer Sci. 48:343-354, 1993; Dong et al., J. Controlled Release 19:171-178,1992; Dong and Hoffmnan, J. Controlled Release 15:141-152, 1991; Kim et al., J. Controlled Release 28:143-152, 1994; Cornejo-Bravo et al., J. Controlled Release 33:223-229, 1995; Wu and Lee, Pharm. Res. 10(10):1544-1547, 1993; Serres et al., Pharm. Res. 13(2):196-201, 1996; Peppas, “Fundamentals of pH- and Temperature-Sensitive Delivery Systems,” in Gurny et al. (eds.), Pulsatile Drug Delivery, Wissenschaftliche Verlagsgesellschaft mbH, Stuttgart, 1993, pp. 41-55; Doelker, “Cellulose Derivatives,” 1993, in Peppas and Langer (eds.), Biopolymers I, Springer-Verlag, Berlin). Representative examples of pH-sensitive polymers include poly(acrylic acid) and its derivatives (including for example, homopolymers such as poly(aminocarboxylic acid); poly(acrylic acid); poly(methyl acrylic acid), copolymers of such homopolymers, and copolymers of poly(acrylic acid) and acrylmonomers such as those discussed above. Other pH sensitive polymers include polysaccharides such as cellulose acetate phthalate; hydroxypropylmethylcellulose phthalate; hydroxypropylmethylcellulose acetate succinate; cellulose acetate trimellilate; and chitosan. Yet other pH sensitive polymers include any mixture of a pH sensitive polymer and a water soluble polymer.”

[0549] As is also disclosed in U.S. Pat. No. 6,689,893, “Likewise, polymeric carriers can be fashioned which are temperature sensitive (see e.g., Chen et al., “Novel Hydrogels of a Temperature-Sensitive Pluronic Grafted to a Bioadhesive Polyacrylic Acid Backbone for Vaginal Drug Delivery,” in Proceed. Intern. Symp. Control. Rel. Bioact. Mater. 22:167-168, Controlled Release Society, Inc., 1995; Okano, “Molecular Design of Stimuli-Responsive Hydrogels for Temporal Controlled Drug Delivery,” in Proceed. Intern. Symp. Control. Rel. Bioact. Mater. 22:111-112, Controlled Release Society, Inc., 1995; Johnston et al., Pharm. Res. 9(3):425-433, 1992; Tung, Int'l J. Pharm. 107:85-90, 1994; Harsh and Gehrke, J. Controlled Release 17:175-186, 1991; Bae et al., Pharm. Res. 8(4):531-537, 1991; Dinarvand and D'Emanuele, J. Controlled Release 36:221-227, 1995; Yu and Grainger, “Novel Thermo-sensitive Amphiphilic Gels: Poly N-isopropylacrylamide-co-sodium acrylate-co-n-N-alkylacrylamide Network Synthesis and Physicochemical Characterization,” Dept. of Chemical & Biological Sci., Oregon Graduate Institute of Science & Technology, Beaverton, Oreg., pp. 820-821; Zhou and Smid, “Physical Hydrogels of Associative Star Polymers,” Polymer Research Institute, Dept. of Chemistry, College of Environmental Science and Forestry, State Univ. of New York, Syracuse, N.Y., pp. 822-823; Hoffman et al., “Characterizing Pore Sizes and Water ‘Structure’ in Stimuli-Responsive Hydrogels,” Center for Bioengineering, Univ. of Washington, Seattle, Wash., p. 828; Yu and Grainger, “Thermo-sensitive Swelling Behavior in Crosslinked N-isopropylacrylamide Networks: Cationic, Anionic and Ampholytic Hydrogels,” Dept. of Chemical & Biological Sci., Oregon Graduate Institute of Science & Technology, Beaverton, Oreg., pp. 829-830; Kim et al., Pharm. Res. 9(3):283-290, 1992; Bae et al., Pharm. Res. 8(5):624-628, 1991; Kono et al., J. Controlled Release 30:69-75, 1994; Yoshida et al., J. Controlled Release 32:97-102.1994; Okano et al., J. Controlled Release 36:125-133, 1995; Chun and Kim, J. Controlled Release 38:39-47, 1996; D'Emanuele and Dinarvand, Int'l J. Pharm. 118:237-242, 1995; Katono et al., J. Controlled Release 16:215-228, 1991; Hoffman, “Thermally Reversible Hydrogels Containing Biologically Active Species,” in Migliaresi et al. (eds.), Polymers in Medicine III, Elsevier Science Publishers B. V., Amsterdam, 1988, pp. 161-167; Hoffman, “Applications of Thermally Reversible Polymers and Hydrogels in Therapeutics and Diagnostics,” in Third International Symposium on Recent Advances in Drug Delivery Systems, Salt Lake City, Utah, Feb. 24-27, 1987, pp. 297-305; Gutowska et al., J. Controlled Release 22:95-104, 1992; Palasis and Gehrke, J. Controlled Release 18:1-12, 1992; Paavola et al., Pharm. Res. 12(12):1997-2002, 1995).”

[0550] As is also disclosed in U.S. Pat. No. 6,689,893, “Representative examples of thermogelling polymers, and their gelatin temperature (LCST (° C.)) include homopolymers such as poly(-methyl-N-n-propylacrylamide), 19.8; poly(N-n-propylacrylamide), 21.5; poly(N-methyl-N-isopropylacrylamide), 22.3; poly(N-n-propylmethacrylamide), 28.0; poly(N-isopropylacrylamide), 30.9; poly(N,n-diethylacrylamide), 32.0; poly(N-isopropylmethacrylamide), 44.0; poly(N-cyclopropylacrylamide), 45.5; poly(N-ethylmethyacrylamide), 50.0; poly(N-methyl-N-ethylacrylamide), 56.0; poly(N-cyclopropylmethacrylamide), 59.0; poly(N-ethylacrylamide), 72.0. Moreover thermogelling polymers may be made by preparing copolymers between (among) monomers of the above, or by combining such homopolymers with other water soluble polymers such as acrylmonomers (e.g., acrylic acid and derivatives thereof such as methylacrylic acid, acrylate and derivatives thereof such as butyl methacrylate, acrylamide, and N-n-butyl acrylamide).”

[0551] As is also disclosed in U.S. Pat. No. 6,689,893, “Other representative examples of thermogelling polymers include cellulose ether derivatives such as hydroxypropyl cellulose, 41° C.; methyl cellulose, 55° C.; hydroxypropylmethyl cellulose, 66° C.; and ethylhydroxyethyl cellulose, and Pluronics such as F-127, 10-15° C.; L-122, 19° C.; L-92, 26° C.; L-81, 20° C.; and L-61, 24° C.”

[0552] As is also disclosed in U.S. Pat. No. 6,689,893, “Preferably, therapeutic compositions of the present invention are fashioned in a manner appropriate to the intended use. Within certain aspects of the present invention, the therapeutic composition should be biocompatible, and release one or more therapeutic agents over a period of several days to months. For example, “quick release” or “burst” therapeutic compositions are provided that release greater than 10%, 20%, or 25% (w/v) of a therapeutic agent (e.g., paclitaxel) over a period of 7 to 10 days. Such “quick release” compositions should, within certain embodiments, be capable of releasing chemotherapeutic levels (where applicable) of a desired agent. Within other embodiments, “low release” therapeutic compositions are provided that release less than 1% (w/v) of a therapeutic agent a period of 7 to 10 days. Further, therapeutic compositions of the present invention should preferably be stable for several months and capable of being produced and maintained under sterile conditions.”

[0553] In one preferred embodiment, the anti-mitotic compound is disposed on or in a drug-eluting polymer that is adapted to elute the anti-mitotic compound at a specified rate. These polymers are well known and are often used in conjunction with drug-eluting stents. Reference may be had, e.g., to U.S. Pat. No. 6,702,850 (multi-coated drug-eluting stent), U.S. Pat. No. 6,671,562 (high impedance drug eluting cardiac lead), U.S. Pat. Nos. 6,206,914, 6,004,346 (intralumenl drug eluting prosthesis), U.S. Pat. Nos. 5,997,468, 5,871,535 (intralumenal drug eluting prosthesis), U.S. Pat. Nos. 5,851,231, 5,851,217, 5,725,567, 5,697,967 (drug eluting stent), U.S. Pat. No. 5,599,352 (method of making a drug elting stent), U.S. Pat. No. 5,591,227 (drug eluting stent), U.S. Pat. No. 5,545,208 (intralumenal drug eluting prosthesis), U.S. Pat. No. 5,217,028 (bipolar cardiac lead with drug eluting device), U.S. Pat. No. 4,953,564 (screw-in drug eluting lead), and the like. The entire disclosure of each of these United States patents is hereby incorporated by reference into this specification.

A Process for Delivering the Magnetic Anti-Mitotic Compound

[0554] FIG. 1 is a schematic of a preferred process 10 for delivering the magentic anti-mitotic compound described elsewhere in this specification to a specified location. In one embodiment, the magnetic anti-mitotic compound is disposed within a biological organism such as, e.g., a blood vessel 12, and particles 14 of the anti-mitotic compound are delivered to a drug-eluting stent 16.

[0555] Referring to FIG. 1, and to the preferred embodiment depicted therein, a bodily fluid, such as blood (not shown for the sake of simplicity of representation) is continuously fed to and through blood vessel 12 in the directions of arrows 20 and 22. In the embodiment depicted, the blood is fed through a generator 26 in order to cause the production of electrical current. In one preferred embodiment, the generator 26 is implanted within an artery 12 or vein 12 of a human being. In another embodiment, not shown, the generator 26 is disposed outside of the artery 12 or Vein 12 of the human being.

[0556] One may use any of the implanted or implantable generators known to those skilled in the art. Thus, e.g., one may use the power supply disclosed and claimed in U.S. Pat. No. 3,486,506, the entire disclosure of which is hereby incorporated by reference into this specification. This patent claims an electric pulse generator adapted to be implanted within a human body. The generator comprises stator winding means, a permanent magent rotor rotatably mounted adjacent the stator winding means for inducing electrical potentials therein, and means responsive to the movement of the heart for imparting an oscillatory rotary motion to said rotor at approximately the frequency of the heart beat. In one embodiment, the device of U.S. Pat. No. 3,486,506 is a spring-driven cardiac stimulator.

[0557] By way of further illustration, the generator 26 may be the heart-actuated generator described and claimed in U.S. Pat. No. 3,554,199, the entire disclosure of which is hereby incorporated by reference in to this specification. Claim 1 of this patent describes: “A device adapted for implantation in the human body for electrically stimulating the heart comprising an envelope housing, an alternating-current generator contained within said housing having a rotor mounted for rotational movement, said rotor having the form of a permanent magnet, a shaft rotatably journaled within said housing, a balance mounted for oscillatory rotational movement about said shaft, the axis of rotation of said rotor being parallel and eccentric to said shaft about which the balance oscillates, a resilient member connected between said housing and the balance, a rotatable member connected with the balance being driven thereby and arranged coaxially with said rotor, a mechanical coupling connecting said rotatable member with said rotor for driving same when said rotatable member is driven by said balance, and electrical contact means connected between said alternating-current generator and the heart muscle for supplying electrical pulses to the heart so as to stimulate the same.”

[0558] By way of further illustration, the device disclosed in U.S. Pat. No. 3,563,245 also comprises a miniaturized power supply unit which employs the mechanical energy of heart muscle contractions to produce electrical energy for a pacemaker. This patent claims: “1. A biologically implantable and energized power supply for implanted electric and electronic devices, comprising: a. Fluid pressure sensing means to be disposed inside a heart ventricle for detecting fluid pressure variations therein; b. an energy conversion unit to be disposed outside the heart; c. fluid pressure transfer means connected to said fluid pressure sensing means and to said energy conversion units; said energy conversion unit comprising: d. means for converting said fluid pressure variations into reciprocal motion; e. an electromagnetic generator having a reciprocally rotatable armature; f. means for communicating said reciprocal motion to the reciprocally rotatable armature and thereby convert same therein to corresponding alternating current pulses of electrical energy; g. rectifier means connected to said electromagnetic generator for rectification of said alternating current of electrical energy to corresponding direct current pulses of electrical energy; h. accumulator means connected to said rectifier means for storage therein of the energy in said direct current pulses of electrical energy; and i. connector means connected to said accumulator means for connection thereto of said implanted electric and electronic devices.”

[0559] By way of yet further illustration, U.S. Pat. No. 3,456,134 (the entire disclosure of which is hereby incorporated by reference into this specification) discloses a piezoelectric converter for implantable devices utilizing a piezoelectric crystal in the form a a weighted cantilever beam that is adapted to respond to body movement to generate electrical pulses. This patent claims: “1. A converter of body motion to electrical energy for use with electronic implants in the body comrpisng: a closed container of a material not affected by body fluids, a piezoelectric crystal in the form of a cantilevered beam within said container and etending inwardly from a wall of said container with one end anchored in said container wall and the opposite end free to move, a weight mounted on said free end of said crystal cantilvered beam, and means connecting said crystal to the electronic implants in the body.”

[0560] As is disclosed in U.S. Pat. No. 3,456,134, when the device of this patent was implanted in the heart of a dog and driven at a mechanical pulse rate of 80 pulses per minute, its produced a maximum output of 4.0 volts at 105 ohms load, or 160 microwatts (see column 2 of the patent).

[0561] By way of yet further illustration, the generator 26 may be the piezoelectric converter disclosed in U.S. Pat. No. 3,659,615, the entire disclosure of which is hereby incorporated by reference into this specification. This patent claims: “1. An encapsulated pacesetter implantable in a living system and responsive to movement of an organic muscle to which it is applied to stimulate and pace the natural movement of the muscle, said pacesetter comprising a piezoelectric unit, a transducer, input electrodes electrically connecting said transducer with said generator unit, generator output electrodes for implantation in the muscle tissue, an encapsulating envelope completely enclosing said pacesetter, said envelope formed of a living tissue compatible material consisting of medical grade silicone rubber and a natural wax substantially uniformly and intimately integrated together as a material possessing flexibility sufficient to respond to movement of the muscle tissue in which it is implanted.”

[0562] By way of yet further illustration, United States paent 4,453,537 (the entire disclosure of which is hereby incorporated by reference into this specification) discloses a pressure actuated artificial heart powered by another implanted device attached to a body muscle; the body muscle is stimulated by an electrical signal from a pacemaker. This patent claims: “A device comprising in combination a body implant device and an apparatus for powering said body implant device; said device comprising a reservoir; said reservoir being implantable in the body adjacent to at least one muscle; a fluid disposed within said reservoir; a pressure actuated body implant device; a conduit connecting said reservoir to said body implant device and providing a fluid connection between said reservoir and body implant device; means for periodically stimulating said at least one body muscle from a relaxed state to a contracted state for periodically contracting said at least one body muscle against said reservoir to pressurize said fluid to cause it to flow from said reservoir toward said body implant device; said body implant device including means responsive to said pressurized fluid for powering said body implant device; upon relaxation of said at least one muscle said reservoir returning to its original unpressurized state, thereby creating a vacuum so as to cause the return of said fluid thereto.” As is disclosed in this patent, “The fluid containing reservoir which is implantable in the body and attachable to a body muscle comprises a piston slidably disposed within a cylinder. Preferably, the piston-cylinder reservoir is implanted in the thigh and attached to the rectus femoris muscle . . . . The piston cylinder reservoir is then implanted in the thigh and the insertion end of the muscle is attached to the cylinder and the origin end of the muscle is attached to the piston. The piston-cylinder reservoir is filled with a fluid such as a gas like nitrogen or a liquid such as silicon or oil, and connected to the artificial heart by a biocompatible flexible plastic tubing. Contraction of the rectus femoris muscle forces the piston into the cylinder thereby pressurizing the fluid contained within the cylinder and causing it to flow out of the cylinder and through the flexible plastic tubing toward the artificial heart.”

[0563] By way of yet further illustration, U.S. Pat. No. 5,810,015, the entire disclosure of which is hereby incorporated by reference into this specicification, discloses an implantable power supply that is comprised means for converting non-electrical energy to electrical energy. Claim 1 of this patent describes: “1. An implantable power supply apparatus for supplying electrical energy to an electrically powered device, comprising: a power supply unit including:

[0564] A. a transcutaneously, invasively rechargeable non-electrical energy storage device (NESD); B. an electrical energy storage device (EESD); and C. an energy converter coupling said NESD and said EESD, said converter including means for converting non-electrical energy stored in said NESD to electrical energy and for transferring said electrical energy to said EESD, thereby storing said electrical energy in said EESD.”

[0565] The “prior art” devices for storing non-electrical energy are described at columns 2-4 of U.S. Pat. No. 5,810,015, wherein it is disclosed that: “Any device may be used to store non-electrical energy in accordance with the invention. Many such devices are known which are suitable to act as NESD 22. For example, devices capable of storing mechanical energy, physical phase transition/pressure energy, chemical energy, thermal energy, nuclear energy, and the like, may be used in accordance with the invention. Similarly, any device may be used to store electrical energy in accordance with the invention and to act as EESD 24. Suitable EESDs include, for example, rechargeable batteries and capacitors. Any device capable of converting non-electrical energy to electrical energy may be used to convert energy in accordance with the invention and to act as energy converter 26. When the non-electrical energy used is mechanical energy, for example, energy converter 26 may include a piezoelectric crystal and associated rectifier circuitry as needed. The apparatus of the invention may also include an implanted electrical circuit, such as a driver for a solenoid driven valve, and means for extracting electrical energy from EESD 24 and applying the extracted electrical energy to the electrical circuit.

[0566] U.S. Pat. No. 5,810,015 also discloses that: “When the non-electrical energy is mechanical energy, for example, NESD 22 may include a closed fluid system wherein recharging occurs by compression of the fluid. Such a system 10′ is represented in FIGS. 2A and 2B. System 10′ is an implantable medicant infusion pump which includes a biocompatable housing 16 for example, made of titanium, having a piercable septum 18 centrally located in its top surface. A bellows assembly 23 extends from the septum 18 to define a variable volume fluid (or medicant) reservoir 21. A valve/accumulator assembly 30 is coupled between reservoir 21 and an exit cannula 34 to establish a selectively controlled fluid/medicant flow path 34A from the reservoir 21 to a point within the body at the distal tip of cannula 34. In one form of the invention, the valve/accumulator assembly 30 has the form shown in FIG. 3, and includes two solenoid valves 30A, 30B which control the filling and emptying of an accumulator 30C in response signals applied by a controller 32. In response to such signals, the accumulator of assembly 30 drives a succession of substantially uniform pulses of medicant through said catheter 34.”

[0567] U.S. Pat. No. 5,810,015 also discloses that: “In the illustrated embodiment, valve/accumulator 30, includes an input port 30′ coupled between reservoir 21 and valve 30A and an output port 30″ coupled between valve 30B and catheter 34. The accumulator includes a diaphragm 31 that is movable between limit surface 33 one side of the diaphragm and limit surface 35 on the other side of the diaphragm. Surface 35 includes open-faced channels therein, defining a nominal accumulator volume that is coupled to valves 30A and 30B. A pressure PB is maintained on the side of diaphragm 31 that is adjacent to surface 35. A pressure of PR is maintained at port 30′, due to the positive pressure exerted on bellows 23 from the fluid in chamber 22A, as described more fully below. A pressure PO is at port 30″, reflecting the relatively low pressure within the patient at the distal end of catheter 34. In operation, the pressure PB is maintained between the PR and PO. Normally, valves 30A and 30B are closed, and diaphragm 31 is biased against surface 33. To generate an output pulse of medicant in catheter 34, valve 30A is opened, and the pressure differential between port 30′ and PB drives fluid into the accumulator 30, displacing the diaphragm 31 to surface 35. The valve 30A is then closed and valve 30B is opened. In response, the pressure differential PB-PO drives an increment of fluid (substantially equal to the previously added fluid) into catheter 34, displacing the diaphragm back to surface 33. Valve 30B then closes, completing the infusion cycle. All valve operations are under the control of controller 32. In other embodiments, other medicant infusion configurations may be used. The controller 32 includes microprocessor-based electronics which may be programmed, for example, by an external handheld unit, using pulse position modulated signals magnetically coupled to telemetry coils within housing 16. Preferably, communication data integrity is maintained by redundant transmissions, data echo and checksums.”

[0568] One embodiment of the non-electrical storage device of U.S. Pat. No. 5,810,015 is disclosed in columns 3 et seq. of such patent, wherein it is disclosed that: “In one form of the invention, the bellows assembly 23, together with the inner surface of housing 16, define a variable volume closed fluid chamber 22A which contains a predetermined amount of a gas phase fluid, such as air. The charge of fluid in chamber 22A maintains a positive pressure in the reservoir 21, so that with appropriately timed openings and closings of the valves 30A and 30B, infusate from reservoir 21 is driven through catheter 34. A port 22B couples the chamber 22A to a mechanical-to-electrical energy converter 26, which in turn is coupled to a rechargeable storage battery 24. The battery 24 is coupled to supply power to controller 32 and valves 30A and 30B, and may be used to power other electronic circuitry as desired.”

[0569] U.S. Pat. No. 5,810,015 discusses the conversion of mechanical energy to electrical energy at columns 4 et seq., wherein it is disclosed that: “An exemplary mechanical-to-electrical energy converter 26 is shown in FIG. 4. That converter 26 includes a first chamber 26A which is coupled directly via port 22B to chamber 22A, and is coupled via valve 26B, energy extraction chamber 26C, and valve 26D to a second chamber 26E. Energy extraction chamber 26C is preferably a tube having a vaned flow restrictors in its interior, where those flow restrictors are made of piezoelectric devices. A rectifier network 26F is coupled to the piezoelectric devices of chamber 26C and provides an electrical signal via line 26′ to EESD 24. The valves 26B and 26D are operated together in response to control signals from controller 32. When those valves are open, fluid (in gas phase) flows from chamber 22A via chamber 26A and 26C to chamber 26E when the pressure in chamber 22A is greater than the pressure in chamber 26E, and in the opposite direction when the pressure in chamber 22A is less than the pressure in chamber 26E. In both flow directions, the vanes of chamber 26C are deflected by the flowing fluid, which results in generation of an a.c. electrical potential, which in turn is rectified by network 26F to form a d.c. signal used to store charge in EESD 24.”

[0570] As is also disclosed in U.S. Pat. No. 5,810,015, “In the operation of this form of the invention, with valves 26B and 26D closed, the chamber 22A is initially charged with fluid, such as air, so that the fluid in chamber 22A exists in gas phase at body temperature over the full range of volume of reservoir 21. Initially, bellows assembly 23 is fully charged with medicant, and thus is fully expanded to maximize the volume of the reservoir 21. The device 10′ is then implanted. After implantation of the device 10′, and valves 26B and 26D are opened, thereby resulting in gas flow through chamber 26C until equilibrium is reached. Then valves 26B and 26D are closed. Thereafter, in response to its internal programming, the controller 32 selectively drives valve/accumulator 30 to complete a flow path between reservoir 21 and cannula, and as described above in conjunction with FIG. 3, driving medicant from reservoir 21, via cannula 34 (and flow path 34A) to a point within the body at a desired rate. In response to that transfer of medicant from reservoir 21, the volume of reservoir 21 decreases, causing an increase in the volume of chamber 22A. As the latter volume increases, a low pressure tends to be established at port 22B. That pressure, with valves 26B and 26D open, in turn draws gas from chamber 26E and through chamber 26C, thereby generating an electrical signal at rectifier 26F. When the reservoir 21 is depleted of medicant, a device such as a syringe may be used to pierce the skin and penetrate the septum 18, and inject a liquid phase medicant or other infusate into reservoir 21, thereby replenishing the medicant in reservoir 21. As liquid is injected into reservoir 21, the bellows assembly 23, expands causing an increase in the volume of reservoir 21 and a decrease in the volume of the phase fluid in chamber 22A, representing storage of mechanical energy. Valves 26B and 26D are then opened, establishing an equilibrating gas flow through chamber 26C, resulting in transfer of charge to EESD 24. In this embodiment, valves 26B and 26D are on opposite sides of chamber 26C. In other embodiments, only one of these valves may be present, and the converter 26 will still function in a similar manner. In yet another embodiment, where chamber 26C has a relatively high flow impedance, there is no need for either of valves 26B and 26D.”

[0571] U.S. Pat. No. 5,810,015 also discloses that: “In another form, the bellows assembly 23, together with the inner surface of housing 16, define a variable volume closed fluid chamber 22A which contains a predetermined amount of a fluid, such as freon, which at normal body temperatures exists both in liquid phase and gas phase over the range of volume of chamber 22A. Preferably, the fluid in reservoir 22A is R-11 Freon, which at body temperature 98.6° F. and in a two phase closed system, is characterized by a vapor pressure of approximately 8 psi, where the ratio of liquid-to-gas ratio varies with the volume of chamber 22A. The charge of fluid in chamber 22A maintains a positive pressure in the reservoir 21, so that with appropriately timed openings and closings of the valves 30A and 30B, infusate from reservoir 21 is driven through catheter 34. A port 22B couples the chamber 22A to a mechanical-to-electrical energy converter 26, which in turn is coupled to a rechargeable storage battery 24. The battery 24 is coupled to supply power to controller 32 and valve 30A and 30B. The mechanical-to-electrical energy converter 26 is the same as that described above and as shown in FIG. 4. In this form of the invention, the non-electrical energy is referred to as physical phase transition/pressure energy. In the operation of this form of the invention, the chamber 22A is initially charged with fluid, such as Freon R-11, so that the fluid in chamber 22A exists in both liquid phase and gas phase at body temperature over the full range of volume of reservoir 21. Initially, bellows assembly 23 is fully charged with medicant and thus fully expanded to maximize the volume of reservoir 21. The device is then implanted. Then after implantation of the device 10′, in response to its internal programming, the controller 32 selectively drives valve/accumulator 30 to complete a flow path between reservoir 21 and cannula, and as described above, in conjunction with FIG. 3, to drive medicant from reservoir 21, via cannula 34 (and flow path 34A) to a point within the body at a desired rate. In response to that transfer of medicant from reservoir 21, the volume of reservoir 21 decreases, causing an increase in the volume of chamber 22A. As the latter volume increases, a low pressure tends to be established at port 22B prior to achievement of equilibrium. That pressure, with valves 26B and 26D open, in turn draws gas from chamber 26E and through chamber 26C, thereby generating an electrical signal at rectifier 26F. As the reservoir 21 is depleted of medicant, a device such as a syringe may be used to pierce the skin and penetrate the septum 18, followed by injection of a liquid phase medicant or other infusate into reservoir 21, thereby replenishing the medicant in reservoir 21. As liquid is injected into reservoir 21, the bellows assembly expands causing an increase in the volume of reservoir 21 and a decrease in the volume of the two phase fluid in chamber 22A. That results in an increase in pressure at port 22B representing storage of mechanical energy. Valves 26B and 26D are then opened, establishing an equilibrating gas flow through chamber 26C, resulting in storage of charge in EESD 24. As the bellows assembly 23 is expanded, the re-compression of chamber 22A effects a re-charge of battery 24. The rectifier 26F establishes charging of battery 24 in response to forward and reverse gas flow caused by the expansion and contraction of bellows assembly 23. The present embodiment is particularly useful in configurations similar to that in FIG. 2A, but where the various components are positioned within housing 16 so that the converter 26 normally is higher than the liquid-gas interface in chamber 22A. When implanted, and where the user is upright. With that configuration, and appropriately charged with Freon, the fluid within converter 26 is substantially all in gas phase. In order to prevent liquid phase Freon from passing to chamber 26C when the user is prone, a gravity activated cut-off valve (not shown) may be located in port 22B.”

[0572] Other implantable devices for converting mechanical energy to electrical energy are discussed at columns 6 et seq. of U.S. Pat. No. 5,810,015. Thus, e.g., it is disclosed that: “In another embodiment in which mechanical energy is stored in NESD 22, shown in FIG. 6, NESD 22 includes a compressible spring 41B. Spring 41B is connected to a compressor assembly 43 which may be accessed transcutaneously. Any means may be used to compress spring 41B. As shown in FIG. 6, compressor 43 includes a screw which may be turned by application of a laparoscopic screwdriver 45.

[0573] As is also disclosed in U.S. Pat. No. 5,810,015, “When the non-electrical energy stored in NESD 22 is chemical energy, NESD 22 includes a fluid activatable chemical system. Recharging may occur by injection of one or more chemical solutions into NESD 22. Any chemical solutions may be used to store chemical energy in NESD 22 in accordance with this embodiment of the invention. For example, a solution of electrolytes may be used to store chemical energy in NESD 22.”

[0574] U.S. Pat. No. 5,810,015 also discloses that: “When the non-electrical energy stored in NESD 22 is thermal energy, NESD 22 includes a thermal differential energy generator capable of generating electrical energy when a fluid having a temperature greater than normal mammalian body temperature is injected into the generator. By way of example, a Peltier effect device may be used, where application of a temperature differential causes generation of an electrical potential. Alternatively, a bimetallic assembly may be used where temperature-induced mechanical motion may be applied to a piezoelectric crystal which in turn generates an electrical potential.”

[0575] U.S. Pat. No. 5,810,015 also discloses that: “In another embodiment, the invention provides a method of supplying energy to an electrical device within a mammalian body which comprises implanting into the mammal an apparatus including a power supply having: a transcutaneously rechargeable NESD; an EESD; and an energy converter coupling said rechargeable means and the storage device, where the converter converts non-electrical energy stored in the NESD to electrical energy and transfers the electrical energy to the EESD, thereby storing the electrical energy in the EESD; and transcutaneously applying non-electrical energy to the NESD. Any of the devices described above may be used in the method of the invention.”

[0576] Referring again to FIG. 1, and to the preferred embodiment depicted therein, the blood preferably flows in the direction of arrow 20, past generator 26, and through stent assembly. The electrical energy from generator 26 is passed via line 28 to regulator 30.

[0577] In one referred emodiment, the generator 26 produces alternating current that is converted into direct current by regulator 30. One may use, e.g., any of the implantable rectifiers known to those skiled in the art as regulator 30.

[0578] These prior art implantable rectifiers are well known and are described, e.g., in U.S. Pat. No. 5,999,849, the entire disclosure of which is hereby incorporated by reference into this specification. As is disclosed in this patent, medical devices that are configured to perform a desired medical function are often implanted in the living tissue of a patient so that a desired function may be carried out as needed for the benefit of the patient. “Numerous examples of implantable medical devices are known in the art, ranging from implantable pacemakers, cochlear stimulators, muscle stimulators, glucose sensors, and the like. Some implantable medical devices are configured to perform the sensing function, i.e., to sense a particular parameter, e.g., the amount of a specified substance in the blood or tissue of the patient, and to generate an electrical signal indicative of the quantity or concentration level of the substance sensed. Such electrical signal is then coupled to a suitable controller, which may or may not be implantable, and the controller responds to the sensed information in a way to enable the medical device to perform its intended function, e.g., to display and/or record the measurement of the sensed substance. An example of an implantable medical device that performs the sensing function is shown, e.g., in U.S. Pat. No. 4,671,288.”

[0579] As is also disclosed in U.S. Pat. No. 5,999,849, “As medical devices have become more useful and numerous in recent years, there is a continual need to provide very low power sensors that may be connected to, or incorporated within, such devices so that the desired function of the device can be carried out without the expenditure of large amounts of power (which power, for an implanted device, is usually limited.) It is known in the art to inductively couple a high frequency ac signal into an implanted medical device to provide operating power for the circuits of the device. Once received within the implanted device, a rectifier circuit, typically a simple full-wave or half-wave rectifier circuit realized with semiconductor diodes, is used to provide the rectifying function. Unfortunately, when this is done, a significant signal loss occurs across the semiconductor diodes, i.e., about 0.7 volts for silicon, which signal loss represents lost power, and for low level input signals of only a volt or two represents a significant decrease in the efficiency of the rectifier. For the extremely low power implantable devices and sensors that have been developed in recent years, low operating voltages, e.g., 2-3 volts, are preferable in order to keep overall power consumption low. Unfortunately, with such low operating voltages are used, a diode voltage drop of 0.7 volts represents a significant percentage of the overall voltage, thus resulting in a highly inefficient voltage rectification or conversion process. An inefficient voltage conversion, in turn, translates directly to increased input power, which increased input power defeats the overall design goal of the low power device. What is needed, therefore, is a low power rectifier circuit that efficiently converts a low amplitude alternating input signal to a low output operating voltage.” The device described and claimed in U.S. Pat. No. 5,999,849 is: “1. A low power switched rectifier circuit comprising: first and second voltage rails (120, 122); a storage capacitor (C1) connected between the first and second voltage rails; first and second input lines (LINE 1, LINE 2); a first switch (M1) connecting the first input line to the first voltage rail; a second switch (M2) connecting the second input line to the first voltage rail; a third switch (M3) connecting the first input line to the second voltage rail; a fourth switch (M4) connecting the second input line to the second voltage rail; a detector circuit for each of said first, second, third, and fourth switches, respectively, powered by voltage on the storage capacitor, that automatically controls its respective switch to close and open as a function of the voltage signal appearing on the first input line relative to the second input line such that, in concert, the first and fourth switches close and the second and third switches open in response to a positive signal on the first input line relative to the second input line, and such that second and third switches close and the first and fourth switches open in response to a negative signal on the first input line relative to the second input line, whereby the first input line is automatically connected to the first voltage rail and the second input line is automatically connected to the second voltage rail whenever a positive signal appears on the first input line relative to the second input line, and whereby the first input line is automatically connected to the second voltage rail and the second input line is automatically connected to the first voltage rail whenever a negative signal appears on the first input line relative to the second input line; and startup means for supplying the storage capacitor with an initial voltage sufficient to power each of the detector circuits; said low power switched rectifier circuit wherein all of said first, second, third, and fourth switches and respective detector circuits are all part of a single integrated circuit.”

[0580] Thus, by way of further illustration, reference to U.S. Pat. No. 6,456,883, the entire disclosure of which is hereby incorporated by reference into this specification, one may use the implantable rectifier disclosed in such patent. This patent claims, e.g., “36. A method for providing an electrical power feed selection for an implantable medical device comprising: transmitting radio frequency signals to an antenna of the implantable medical device; rectifying the radio frequency signals by a rectifier circuit; storing energy contained in the transmitted radio frequency signals in a supplemental power source that comprises an energy storage device; comparing voltage levels of an electrical main power source and the supplemental power source and outputting a signal from a comparator indicating which power source is greater; receiving a signal from the comparator and selecting the supplemental power source as a power feed when the main power source is depleted; and maintaining the voltage level from the supplemental power source at a predetermined level when the supplemental power source has been selected as the power feed . . . . ”

[0581] Referring again to FIG. 1, and in one preferred embodiment thereof, the regulator 30 is operatively connected to controller 32 by means of a link 34, and the regulator 30 is comprised of an and justable power supply whose output may be regulated in response to signals fed to such regulator 30 by controller 32.

[0582] One may use any of the implantable power supplies known to those in the art as regulator 32. Thus, e.g., one may use the biologically implantable and energized power supply disclosed in U.S. Pat. No. 3,563,245, the entire disclosure of which is hereby incorporated by reference into this specification.

[0583] Thus, by way of further illustration, one may use the power supply disclosed in U.S. Pat. No. 3,757,795, the entire disclosure of which is hereby incorporated by reference into this specification. Claim 6 of this patent describes: “6. Implantable electrical medical apparatus including circuit means for developing electrical signals for stimulating selected portions of a body, comprising: electrically redundant power supply means having a pair of supply junctions; means connecting said circuit means to said supply junctions; voltage doubling means having first and second output terminals adapted to be connected to a body for electrical stimulation thereof; said voltage doubling means including a capacitor having a pair of plates; means connecting one of said plates to one of said supply junctions; means connecting the other of said plates to said first output terminal; means connecting said second output terminal to the other supply junction; electrical switch means connecting said one plate to said other supply junction; further electrical switch means connecting said second output terminal to said one supply junction; and all said switch means being connected to said circuit means and including means for selectably reversing the polarity of electrical energy to said capacitor.”

[0584] By way of yet further illustration, one may use the power supply disclosed in U.S. Pat. No. 4,143,661, the entire disclosure of which is hereby incorporated by reference into this specification. As is dislosed in the abstract of this patent, “A power supply system to operate an implanted electric-powered device such as a blood pump. A secondary coil having a biocompatible covering is implanted to subcutaneously encircle either the abdomen or the thigh at a location close to the exterior skin. The secondary coil is electrically interconnected with an implanted storage battery and the blood pump. A primary coil of overlapping width is worn by the patient at a location radially outward of the secondary coil. An external battery plus an inverter circuit in a pack is attached to a belt having a detachable buckle connector which is conventionally worn about the waist. Efficient magnetic coupling is achieved through the use of two air-core windings of relatively large diameter.”

[0585] In the specification of U.S. Pat. No. 4,143,661, some of the preferred embodiments of the invention of such patent are discussed. It is disclosed that: “This invention relates to electric power supplies and more particularly to a power supply for a device which is implanted within a living body and a method for operation thereof. The relatively high amount of power required by circulatory support devices, such as a partial or total artificial heart, has rendered most implantable, self-sufficient energy sources inapplicable, such as those used for a pacemaker. Only high-power, radioisotope heat sources have held any promise of sustained outputs of several watts; however, the utilization of such an energy source has been complicated by its inherent need for a miniature, high efficiency heat engine, as well as by serious radiation-related problems. All other practical approaches to powering an artificial heart or circulatory assist system of some type necessarily depend on a more or less continuous flow of energy from outside the body. Results of early efforts at infection-free maintenance of long-term percutaneous connections were discouraging and thus highlighted the desirability, at least for the long term, of powering such an implanted device though intact skin.”

[0586] As is also disclosed in U.S. Pat. No. 4,143,661, “One of the earliest approaches to the transmission of energy across intact skin involves the generation of a radio frequency field extending over a substantial area of the body, such that significant power could be extracted from coils located in the vicinity of the implanted power-consuming device itself. Placement of substantial amounts of ferrite materials within such coils to permit the capture of a greater proportion of the incident field was also investigated, as reported in the article by J. C. Schuder et al. in the 1964 Transactions ACEMB. However, difficulty has been experienced in reconciling the conflicting requirement of magnetic circuit geometry with a surgically feasible, variable tissue structure. In another proposed alternative design, a secondary coil is implanted in such a manner that the center of the coil remains accessible through a surgically constructed tunnel of skin; however, such devices have not yielded satisfactory performance. Predominant failure modes included necrosis of the skin tunnel tissue caused by mechanical pressure and excess heat generation—see the 1975 report of I.I.T. Research Institute, by Brueschke et al., N.I.H. Report No. NO1-HT-9-2125-3, page 25.”

[0587] U.S. Pat. No. 4,143,661 also discloses that: “As a result of the present invention, it has been found that a satisfactory system can be achieved by the employment of a secondary coil which is implanted just below the skin of the abdomen or the thigh so that it encircles the body member along most of its length and lies at a location close to the skin. The system includes an implanted storage battery plus the necessary interconnections between the secondary coil, the battery and the electric-powered device, which will likely be a circulatory assist device of some type. A primary coil, in the form of an encircling belt which is greater in width than the secondary implanted coil, fits around the body member in the region just radially outward thereof. A portable external A.C. power source, usually a rechargeable battery plus an appropriate inverter, is in electrical connection with the primary coil. These coils function efficiently as an air-core transformer and sufficient power is transcutaneously supplied via the secondary coil to both operate the device and charge the implanted storage battery.”

[0588] By way of yet further illustration, one may use the power supply described in U.S. Pat. No. 4,665,896, the entire disclosure of which is hereby incorporated by reference into this specification. This patent claims: “1. In an implanted blood pump system wherein power for driving the pump is provided by a transcutaneous transformer having an external primary winding means and an implanted secondary winding means and shunt regulator means for controlling the driving voltage applied to the pump, a method for regulating the driving voltage applied to the primary winding means, comprising, sensing the power factor in the primary winding means, comparing the sensed power factor to a predetermined power factor level selected to correspond with a desired pump driving voltage, and adjusting the voltage level in the primary winding means to substantially equalize the sensed power factor and the predetermined power factor level.”

[0589] By way of yet further illustration, one may use the surgically implanted power supply described in U.S. Pat. No. 5,702,430, the entire disclosure of which is hereby incorporated by reference into this specification. This patent claims: “1. A surgically implantable power supply comprising battery means for providing a source of power, charging means for charging the battery means, enclosure means isolating the battery means from the human body, gas holding means within the enclosure means for holding gas generated by the battery means during charging, seal means in the enclosure means arranged to rapture when the internal gas pressure exceeds a certain value and inflatable gas container means outside the enclosure means to receive gas from within the enclosure means when the seal means has been ruptured.” As is discussed in the specification of this patent, a rectifier device may be used with the claimed assembly. Thus, e.g., it is disclosed that: “Power for the internal battery charging circuit is obtained via a subcutaneous secondary coil 230. This coil is connected to a capacitor/rectifier circuit 231 that is tuned to the carrier frequency being transmitted transcutaneously to the secondary coil 230. The rectifier may incorporate redundant diodes and a fault detection circuit as shown, which operates similar to the power transistor bridge 222 and logic circuit 223 of FIG. 9(a), except that the power transistors are replaced by diodes. This tuned capacitor/rectifier circuit may also incorporate a filter arrangement 211 to support serial communication interface (SCI) reception via the secondary coil 230. A level detection comparator 232 is provided to convert the analog signal produced by the filter 211 into a digital signal compatible with an SCI receiver 460. A power transistor 233 or other modulation device may also be incorporated to support SCI transmission via the secondary coil 230. A redundant transistor bridge such as the bridge 222 used for PWM current limiting may be used in place of the transistor 233 for improved fault tolerance. This SCI interface provides for changing programmable settings used by the control algorithm and monitoring of analog inputs to the microcontroller such as ECG1, ECG2, MCH1, CUR1, CUR2, TEMP, V1, and V2.”

[0590] By way of yet further illustration, one may use the power supply disclosed in U.S. Pat. No. 5,949,632, the entire disclosure of which is hereby incorporated by reference into this specification. This patent claims: “Power for the internal battery charging circuit is obtained via a subcutaneous secondary coil 230. This coil is connected to a capacitor/rectifier circuit 231 that is tuned to the carrier frequency being transmitted transcutaneously to the secondary coil 230. The rectifier may incorporate redundant diodes and a fault detection circuit as shown, which operates similar to the power transistor bridge 222 and logic circuit 223 of FIG. 9(a), except that the power transistors are replaced by diodes. This tuned capacitor/rectifier circuit may also incorporate a filter arrangement 211 to support serial communication interface (SCI) reception via the secondary coil 230. A level detection comparator 232 is provided to convert the analog signal produced by the filter 211 into a digital signal compatible with an SCI receiver 460. A power transistor 233 or other modulation device may also be incorporated to support SCI transmission via the secondary coil 230. A redundant transistor bridge such as the bridge 222 used for PWM current limiting may be used in place of the transistor 233 for improved fault tolerance. This SCI interface provides for changing programmable settings used by the control algorithm and monitoring of analog inputs to the microcontroller such as ECG1, ECG2, MCH1, CUR1, CUR2, TEMP, V1, and V2.”

[0591] By way of yet further illustration, one may use the power supply described in U.S. Pat. No. 5,954,058, the entire disclosure of which is hereby incorporated by reference into this specification. This patent claims: “A rechargeable electrically powered implantable infusion pump and power unit therefor, for intracorporeally dispensing a liquid in a body of a living being, with said infusion pump and power until therefor being capable of subcutaneous implantation in said body of said living being, said infusion pump and power unit comprising:

[0592] A. a rigid or semi-rigid outer pump housing; B. a flexible liquid storage chamber inside said outer-pump housing for containing a liquid to be dispensed intracorporeally in the body of said being by said infusion pump, said liquid storage chamber having a variable volume and a transcutaneously accessible self-sealing inlet and outlet port in communication with said outer-pump housing, such that said liquid can alternatively be introduced into said chamber through said port to refill said chamber, and be pumped out of said chamber through said port upon actuation of electrically powered infusion pump means for intracorporeally dispensing said liquid in the body of said being; C. electrically powered infusion pump means for causing said liquid to be pumped out of said liquid storage chamber through said port thereof and dispensed within said body of said living being upon actuation of said infusion pump means; D. a charging fluid storage chamber at least in part surrounding said liquid storage chamber and containing a two phase charging fluid, wherein the liquid phase to gas phase ratio of said charging fluid is representative of a store of potential energy in the form of physical phase transition/pressure energy which is transferrable into kinetic energy upon the physical phase transition of said charging fluid due to the vaporization of said charging fluid form its liquid phase to its vapor phase; E. rechargeable electrical energy source means contained within said outer-pump housing, for rechargeably receiving and storing electrical energy and for supplying said stored electrical energy to power said infusion pump means; and F. energy converter means in communication with both said charging fluid storage chamber and said rechargeable electrical energy source means, and contained within said outer-pump housing, for converting the released physical phase transition/pressure potential energy of said charging fluid to said electrical energy and for supplying said electrical energy to said rechargeable electrical energy source means.”

[0593] By way of yet further illustration, one may use the adjustable power supply described in U.S. Pat. No. 6,141,583, the entire disclosure of which is hereby incorporated by reference into this specification. As is discussed in the abstract of this patent, there is disclosed “A method or apparatus for conserving power in an implantable medical device (IMD) of the type having at least one IC powered by a battery wherein, in each such IC, a voltage dependent oscillator for providing oscillator output signals at an oscillation frequency dependent upon applied supply voltage to the IC is incorporated into the IC. The voltage dependent oscillator oscillates at a frequency that is characteristic of the switching speed of all logic circuitry on the IC die that can be attained with the applied supply voltage. The applied supply voltage is regulated so that the oscillation frequency is maintained at no less than a target or desired oscillation frequency or within a desired oscillation frequency range. The power supply voltage that is applied to the IC is based directly on the performance of all logic circuitry of the IC. In order to provide the comparison function, the oscillator output signals are counted, and the oscillator output signal count accumulated over a predetermined number of system clock signals is compared to a target count that is correlated to the desired oscillation frequency. The counts are compared, and the supply voltage is adjusted upward or downward or is maintained the same dependent upon whether the oscillator output signal count falls below or rises above or is equal to the target count, respectively. The supply voltage adjustment is preferably achieved employing a digitally controlled power supply by calculating a digital voltage from the comparison of the oscillator output signal count to the target count, and storing the digital voltage in a register of the power supply.”

[0594] Referring again to FIG. 1, and in the preferred embodiment depicted therein, the generator 26, in one embodiment, produces alternating current This alternating current is fed via line 28 to regulator 30, which preferably converts the alternating current to direct current and either feeds it in a first direction via line 36 to metallic stent 16, or feeds it in another direction via line 38 to metallic stent 16. As will be apparent to those skilled in the art, the regulator 26 thus has the capability of producing a magnetic field of a first polarity (when the direct current is fed in a first direction 36) or a second polarity (swhen the direct current is fed in a second direction 38), as dictated by the well-known Lenz's law.

[0595] In one embodiment, the regulator 26 is capable not only of changing the direction of the electrical current, but also its amount. It preferably is comprised of a variable resistance circuit that can modulate its output.

[0596] In the preferred embodiment depicted, the regulator 26 is comprised of a transceiver (not shown) whose antenna 40 is in telemetric contact with a controller 32. The controller 32 is preferably in telemetric contact with biosensors 42, 44, 46, and/or 48; and, depending upon the information received from one or more of such sensors, can direct the regulator 30 to increase the production of electrical current in one direction, or another, to decrease the production of electrical current in one direction, or another, or to cease the production of electrical current in one direction or another.

[0597] Biosensors 42, 44, 46, and/or 48 may be one or more of the implantable biosensors known to those skilled in the art.

[0598] In one embodiment, one of such sensors 42, 44, 46, and/or 48 can determine the extent to which two recognition molecules have bound to each other. Thus, e.g., one may use the process and apparatus described in U.S. Pat. No. 5,376,556, in which an analyte-mediated ligand binding event is monitored; the entire disclosure of this United States patent is hereby incorporated by reference into this specification. Claim 1 of this patent describes “A method for determining the presence or amount of an analyte, if any, in a test sample by monitoring an analyte-mediated ligand binding event in a test mixture the method comprising: forming a test mixture comprising the test sample and a particulate capture reagent, said particulate capture reagent comprising a specific binding member attached to a particulate having a surface capable of inducing surface-enhanced Raman light scattering and also having attached thereto a Raman-active label wherein said specific binding member attached to the particulate is specific for the analyte, an analyte-analog or an ancillary binding member; providing a chromatographic material having a proximal end and a distal end, wherein the distal end of said chromatographic material comprises a capture reagent immobilized in a capture situs and capable of binding to the analyte; applying the test mixture onto the proximal end of said chromatographic material; allowing the test mixture to travel from the proximal end toward the distal end by capillary action; illuminating the capture situs with a radiation sufficient to cause a detectable Raman spectrum; and monitoring differences in spectral characteristics of the detected surface-enhanced Raman scattering spectra, the differences being dependent upon the amount of analyte present in the test mixture.”

[0599] By way of further illustration, one may use the “triggered optical sensor” described and claimed in U.S. Pat. No. 6,297,059, the entire disclosure of which is hereby incorporated by reference into this specification. This patent claims (in claim 1) thereof “. An optical biosensor for detection of a multivalent target biomolecule comprising: a substrate having a fluid membrane thereon; recognition molecules situated at a surface of said fluid membrane, said recognition molecule capable of binding with said multivalent target biomolecule and said recognition molecule linked to a single fluorescence molecule and as being movable upon said surface of said fluid membrane; and, a means for measuring a change in fluorescent properties in response to binding between multiple recognition molecules and said multivalent target biomolecule.” In column 1 of this patent, other biological sensors are discussed, it being stated that: “Biological sensors are based on the immobilization of a recognition molecule at the surface of a transducer (a device that transforms the binding event between the target molecule and the recognition molecule into a measurable signal). In one prior approach, the transducer has been sensitive to any binding, specific or non-specific, that occurred at the transducer surface. Thus, for surface plasmon resonance or any other transduction that depended on a change in the index of refraction, such sensors have been sensitive to both specific and non-specific binding. Another prior approach has relied on a sandwich assay where, for example, the binding of an antigen by an antibody has been followed by the secondary binding of a fluorescently tagged antibody that is also in the solution along with the protein to be sensed. In this approach, any binding of the fluorescently tagged antibody will give rise to a change in the signal and, therefore, sandwich assay approaches have also been sensitive to specific as well as non-specific binding events. Thus, selectivity of many prior sensors has been a problem. Another previous approach where signal transduction and amplification have been directly coupled to the recognition event is the gated ion channel sensor as described by Cornell et al., ‘A Biosensor That Uses Ion-Channel Switches’, Nature, vol. 387, Jun. 5, 1997. In that approach an electrical signal was generated for measurement. Besides electrical signals, optical biosensors have been described in U.S. Pat. No. 5,194,393 by Hugl et al. and U.S. Pat. No. 5,711,915 by Siegmund et al. In the later patent, fluorescent dyes were used in the detection of molecules.”

[0600] By way of yet further illustration, one may use the sensor element disclosed in U.S. Pat. No. 6,589,731, the entire dislcosure of which is hereby incorporated by reference into this specification. This patent, at column 1 thereof, also discusses biosensors, stating that:“Biosensors are sensors that detect chemical species with high selectivity on the basis of molecular recognition rather than the physical properties of analytes. See, e.g., Advances in Biosensors, A. P. F. Turner, Ed. JAI Press, London, (1991). Many types of biosensing devices have been developed in recent years, including enzyme electrodes, optical immunosensors, ligand-receptor amperometers, and evanescent-wave probes. The detection mechanism in such sensors can involve changes in properties such as conductivity, absorbance, luminescence, fluorescence and the like. Various sensors have relied upon a binding event directly between a target agent and a signaling agent to essentially turn off a property such as fluorescence and the like. The difficulties with present sensors often include the size of the signal event which can make actual detection of the signal difficult or affect the selectivity or make the sensor subject to false positive readings. Amplification of fluorescence quenching has been reported in conjugated polymers. For example, Swager, Accounts Chem. Res., 1998, v. 31, pp. 201-207, describes an amplified quenching in a conjugated polymer compared to a small molecule repeat unit by methylviologen of 65; Zheng et al., J. Appl. Polymer Sci., 1998, v. 70, pp. 599-603, describe a Stern-Volmer quenching constant of about 1000 for poly(2-methoxy,5-(2′-ethylhexloxy)-p-phenylene-vinylene (MEH-PPV) by fullerenes; and, Russell et al., J. Am. Chem. Soc., 1982, v. 103, pp. 3219-3220, describe a Stern-Volmer quenching constant for a small molecule (stilbene) in micelles of about 2000 by methylviologen. Despite these successes, continued improvements in amplification of fluorescence quenching have been sought. Surprisingly, a KSV of greater than 105 has now been achieved.”

[0601] Similarly, and by way of further illustration, one may use the light-based sensors discussed at column 1 of U.S. Pat. No. 6,594,011, the entire disclosure of which is hereby incorporated by reference into this specification. As is disclosed in such column 1, “It is well known that the presence or the properties of substances on a material's surface can be determined by light-based sensors. Polarization-based techniques are particularly sensitive; ellipsometry, for example, is a widely used technique for surface analysis and has successfully been employed for detecting attachment of proteins and smaller molecules to a surface. In U.S. Pat. No. 4,508,832 to Carter, et al. (1985), an ellipsometer is employed to measure antibody-antigen attachment in an immunoassay on a test surface. Recently, imaging ellipsometry has been demonstrated, using a light source to illuminate an entire surface and employing a two-dimensional array for detection, thus measuring the surface properties for each point of the entire surface in parallel(G. Jin, R. Janson and H. Arwin, “Imaging Ellipsometry Revisited: Developments for Visualization of Thin Transparent Layers on Silicon Substrates,” Review of Scientific Instruments, 67(8), 2930-2936, 1996). Imaging methods are advantageous in contrast to methods performing multiple single-point measurements using a scanning method, because the status of each point of the surface is acquired simultaneously, whereas the scanning process takes a considerable amount of time (for example, some minutes), and creates a time lag between individual point measurements. For performing measurements where dynamic changes of the surface properties occur in different locations, a time lag between measurements makes it difficult or impossible to acquire the status of the entire surface at any given time. Reported applications of imaging ellipsometry were performed on a silicon surface, with the light employed for the measurement passing through +the surrounding medium, either air or a liquid contained in a cuvette. For applications where the optical properties of the surrounding medium can change during the measurement process, passing light through the medium is disadvantageous because it introduces a disturbance of the measurement.”

[0602] U.S. Pat. No. 6,594,011 goes on to disclose (at columns 1-2) that: “By using an optically transparent substrate, this problem can be overcome using the principle of total internal reflection (TIR), where both the illuminating light and the reflected light pass through the substrate. In TIR, the light interacting with the substance on the surface is confined to a very thin region above the surface, the so-called evanescent field. This provides a very high contrast readout, because influences of the surrounding medium are considerably reduced. In U.S. Pat. No. 5,483,346 to Butzer, (1996) the use of polarization for detecting and analyzing substances on a transparent material's surface using TIR is described. In the system described by Butzer, however, the light undergoes multiple internal reflections before being analyzed, making it difficult or impossible to perform an imaging technique, because it cannot distinguish which of the multiple reflections caused the local polarization change detected in the respective parts of the emerging light beam. U.S. Pat. No. 5,633,724 to King, et al. (1997) describes the readout of a biochemical array using the evanescent field. This patent focuses on fluorescent assays, using the evanescent field to excite fluorescent markers attached to the substances to be detected and analyzed. The attachment of fluorescent markers or other molecular tags to the substances to be detected on the surface requires an additional step in performing the measurement, which is not required in the current invention. The patent further describes use of a resonant cavity to provide on an evanescent field for exciting analytes.”

[0603] By way of yet further illustration, one may use one or more of the biological sensors disclosed in U.S. Pat. No. 6,546,267 (biological sensor); U.S. Pat. No. 5,972,638 (biosensor); U.S. Pat. Nos. 5,854,863; 6,411,834 (biological sensor); U.S. Pat. No. 4,513,280 (device for detecting toxicants); U.S. Pat. Nos. 6,666,905; 5,205,292; 4,926,875; 4,947,854 (epicardial multifunctional probe); U.S. Pat. Nos. 6,523,392; 6,169,494 (biotelemetry locator); U.S. Pat. No. 5,284,146 (removable implanted device); U.S. Pat. Nos. 6,624,940; 6,571,125; 5,971,282; 5,766,934 (chemical and biological sensosrs having electroactive polymer thin films attached to microfabricated device and possessing immobilized indicator molecules); U.S. Pat. No. 6,607,480 (evaluation system for obtaining diagnostic information from the signals and data of medical sensor systems); U.S. Pat. Nos. 6,493,591; 6,445,861; 6,280,586; 5,327,225 (surface plasmon resonance sensor); and the like. The entire disclosure of each of these United States patents is hereby incorporated by reference into this specification.

[0604] By way of further illustration, one may use the implantable extractable probe described in U.S. Pat. No. 5,205,292, the entire disclosure of which is hereby incorporated by reference into this specification. This probe comprises a biological sensor attached to the body of the probe such as, e.g., a doppler transducer for measuring blood flow.

[0605] In one embodiment, the nanowire sensor described in published U.S. patent application US 2002/0117659 is used; the entire disclosure of this United States patent application is hereby incorporated by reference into this specification. As is disclosed in this published patent aplication, “The invention provides a nanowire or nanowires preferably forming part of a system constructed and arranged to determine an analyte in a sample to which the nanowire(s) is exposed. ‘Determine’, in this context, means to determine the quantity and/or presence of the analyte in the sample. Presence of the analyte can be determined by determining a change in a characteristic in the nanowire, typically an electrical characteristic or an optical characteristic. E.g. an analyte causes a detectable change in electrical conductivity of the nanowire or optical properties. In one embodiment, the nanowire includes, inherently, the ability to determine the analyte. The nanowire may be functionalized, i.e. comprising surface functional moieties, to which the analytes binds and induces a measurable property change to the nanowire. The binding events can be specific or non-specific. The functional moieties may include simple groups, selected from the groups including, but not limited to, —OH, —CHO, —COOH, —SO₃H, —CN, —NH₂, SH, —COSH, COOR, halide; biomolecular entities including, but not limited to, amino acids, proteins, sugars, DNA, antibodies, antigens, and enzymes; grafted polymer chains with chain length less than the diameter of the nanowire core, selected from a group of polymers including, but not limited to, polyamide, polyester, polyimide, polyacrylic; a thin coating covering the surface of the nanowire core, including, but not limited to, the following groups of materials: metals, semiconductors, and insulators, which may be a metallic element, an oxide, an sulfide, a nitride, a selenide, a polymer and a polymer gel. In another embodiment, the invention provides a nanowire and a reaction entity with which the analyte interacts, positioned in relation to the nanowire such that the analyte can be determined by determining a change in a characteristic of the nanowire.”

[0606] A drug delivery device that is comprised of a biological sensor is disclosed in published United States patent application US 2002/0011601, the entire disclosure of which is hereby incorporated by reference into this specification. As is disclosed in the “Abstract” of this published patent application, “An Implantable Medical Device (IMD) for controllably releasing a biologically-active agent such as a drug to a body is disclosed. The IMD includes a catheter having one or more ports, each of which is individually controlled by a respective pair of conductive members located in proximity to the port. According to the invention, a voltage potential difference generated across a respective pair of conductive members is used to control drug delivery via the respective port. In one embodiment of the current invention, each port includes a cap member formed of a conductive material. This cap member is electrically coupled to one of the conductive members associated with the port to form an anode. The second one of the conductive members is located in proximity to the port and serves as a cathode. When the cap member is exposed to a conductive fluid such as blood, a potential difference generated between the conductors causes current to flow from the anode to the catheter, dissolving the cap so that a biologically-active agent is released to the body. In another embodiment of the invention, each port is in proximity to a reservoir or other expandable member containing a cross-linked polymer gel of the type that expands when placed within an electrical field. Creation of an electric field between respective conductive members across the cross-linked polymer gel causes the gel to expand. In one embodiment, this expansion causes the expandable member to assume a state that blocks the exit of the drug from the respective port. Alternatively, the expansion may be utilized to assert a force on a bolus of the drug so that it is delivered via the respective port. Drug delivery is controlled by a control circuit that selectively activates one or more of the predetermined ports.”

[0607] At column 1 of published U.S. patent application US 2002/0111601, reference is made to other implantable drug delivery systems. It is disclosed that (in paragraph 0004) that “While implantable drug delivery systems are known, such systems are generally not capable of accurately controlling the dosage of drugs delivered to the patient. This is particularly essential when dealing with drugs that can be toxic in higher concentrations. One manner of controlling drug delivery involves using electro-release techniques for controlling the delivery of a biologically-active agent or drug. The delivery process can be controlled by selectively activating the electro-release system, or by adjusting the rate of release. Several systems of this nature are described in U.S. Pat. Nos. 5,876,741 and 5,651,979 which describe a system for delivering active substances into an environment using polymer gel networks. Another drug delivery system is described in U.S. Pat. No. 5,797,898 to Santini, Jr. which discusses the use of switches provided on a microchip to control the delivery of drugs. Yet another delivery device is discussed in U.S. Pat. No. 5,368,704 which describes the use of an array of valves formed on a monolithic substrate that can be selectively activated to control the flow rate of a substance through the substrate.” The disclosures of each of U.S. Pat. Nos. 5,368,704, 5,797,898, and 5,876,741 are hereby incorporated by reference into this specification.

[0608] In one embodiment, and referring again to FIG. 1, sensor 36 is an electromagnetic flow meter that, as is known to those skilled in the art, is an instrument which is used to qualitiatively measure flow velocity. Reference may be had to a text by J. A. Tuszynski et al., “Biomedical Applications of Introductory Physics” (John Wiley & Sons, Inc., New York, N.Y., 2001), at page 260.

[0609] FIG. 2 is a schematic diagram of an electromagnetic flow meter applied to an artery; this Figure is adapted from page 261 of the aforementioned Tuszynski et al. text.

[0610] Referring such FIG. 2, it will be seen that blood (not shown) flows through artery 100 in the direction of arrow 102. A first signal electrode 102 at a first voltage potential is electrically connected to a second signal electrode (not shown) at a second voltage potential. A magentic field in the direction of arrows is created by magnet 108. As blood flows in the direction of arrow 102 and between the first signal electrode 102 and the second signal electrode (not shown), a current is induced by such flow, and such current is measured by a galvanometer (not shown) that is part of the sensor 36 (see FIG. 1).

[0611] In addition to the device depicted in FIG. 2, or instead of such device, one may use one or more of the implantable flow meters known to the prior art. Thus, e.g., one may use one or more of the implantable flow meters disclosed in U.S. Pat. No. 4,915,113 (method and apparatus for monitoring the patency of vascular grants); U.S. Pat. No. 6,458,086 (implantable blood flow monitoring system); U.S. Pat. No. 6,668,197 (treatement using implantable devices); U.S. Pat. No. 6,824,480 (monitoring treatment using implantable telemetric sensors); and the like. The entire disclosure of each of these United States patents is hereby incorporated by reference into this specification.

[0612] By way of further illustration, claim 1 of U.S. Pat. No. 4,915,113 describes: an

[0613] “Implantable flow meter apparatus for monitoring vascular graft patency comprising:(a) at least one ring member for surrounding a blood vessel graft intermediate its ends, said at least one ring member supporting transducer means thereon to define an axis extending internal of said blood vessel graft when said at least one ring member is installed on said blood vessel graft; (b) implantable electrical means positionable subcutaneously at a predetermined access site displaced from said one at least one ring member; (c) conductor means coupling said transducer means to said electrical means; and (d) barrier patch means having an area much greater than the cross-sectional area of said conductor means, said conductor means passing generally through the center of said patch means for inhibiting passage of infection producing organisms from said access site along said conductor means.”

[0614] Referring again to FIG. 1, and in the preferred embodiment depicted, a growth of plaque 41 is shown. As will be apparent, and for the sake of simplicity of representation, the plaque 41 is shown on only one portion of the stent 30.

[0615] As is known to those in the art, and as is illustrated at page 135 of the Tuszynski et al. text (see problem 11.9), when a segment of an artery is narrowed down by arterisclerotic plaque to one fifth of its cross-sectional area, the velocity increases five times; but the blood pressure increases about about 1 percent.

[0616] Thus, e.g., if one were to use the flow-meter depicted in FIG. 2, and assuming a magnetic field of about 10 Gauss, a blood flow rate of about 20 centimeters per second, a diamter of the artery 100 of about 1 centimeter, the voltage difference between the first electrode 104 and the second electrode (not show) will be about 1.5 millivolts; and the current flow will be proportional to the resistance in the circuit formed by the two electrodes. With, e.g., a 5 ohm resistance, the current would be about 0.3 milliamperes.

[0617] Referring again to FIG. 1, when such current of about 0.3 milliamperes is detected by the sensor 42, such information is preferably transmitted by such sensor 42 to the controller 32. The controller 32 then can determine, based upon this infomration and other information, to what extent, if any, it wishes to change the activity of regulator 30.

[0618] Referring again to FIG. 1, and in the embodiment depicted, the stent 16 also is preferably comprised of sensors 44, 46, and 48. One or more of these sensors may be adapted to detect the amount of anti-mitotic agent in the bloodstream.

[0619] Referring again to FIG. 1, and to the preferred embodiment depicted therein, particles of magnetic anti-mitotic agent 14 are fed into the artery 11 by means of source 50. These magnetic particles are directed by an externally applied magnetic field 52 towards the stent 16. As will be apparent, the stent 16 will also have a magnetic moment, depending upon the direction in which current is fed from regulator 30 to the stent 16. When the magnetic momement of the stent is opposite to that of the magnetic anti-mitotic particles 14, the anti-mitotic particles are attracted to the stent 16; when the magnetic moment of the stent 16 is the same as that of the anti-mitotic particles 14, the anti-mitotic particles are directed to the stent. Thus, the controller 32 can control the extent to which, if any, the stent 16 attracts and/or repels the magnetic anti-mitotic particles in its vicinity.

[0620] Similarly, when externally applied magnetic field 52 has a magnetic moment that is opposite to that of the magentic particles, these particles can be driven towards the stent; and they can be pulled from the stent when the externally applied magnetic field has an opposite orientation.

[0621] Thus, there are two separate factors that can be varied to either draw the magentic anti-mitotic particles towards the stent, or to repel such anti-mitotic particles from the stent: the strength and orientation of the magnetic field of the stent (which is controllable via regulator 30), and the strength and orientation of the externally applied magnetic field 52.

[0622] One may use any of prior art means for externally applying magnetic field 52. Thus, and referring to published United States patent application 2004/0030379, the entire disclosure of which is hereby incorporated by reference into this specification, “An external electromagnetic source or field may be applied to the patient having an implanted coated medical device using any method known to skilled artisan. In the method of the present invention, the electromagnetic field is oscillated. Examples of devices which can be used for applying an electromagnetic field include a magnetic resonance imaging (“MRI”) apparatus. Generally, the magnetic field strength suitable is within the range of about 0.50 to about 5 Tesla (Webber per square meter). The duration of the application may be determined based on various factors including the strength of the magnetic field, the magnetic substance contained in the magnetic particles, the size of the particles, the material and thickness of the coating, the location of the particles within the coating, and desired releasing rate of the biologically active material.”

[0623] Published United States patent application 2004/0030379 also disclose that “In an MRI system, an electromagnetic field is uniformly applied to an object under inspection. At the same time, a gradient magnetic field, superposing the electromagnetic field, is applied to the same. With the application of these electromagnetic fields, the object is applied with a selective excitation pulse of an electromagnetic wave with a resonance frequency which corresponds to the electromagnetic field of a specific atomic nucleus. As a result, a magnetic resonance (MR) is selectively excited. A signal generated is detected as an MR signal. See U.S. Pat. No. 4,115,730 to Mansfield, U.S. Pat. No. 4,297,637 to Crooks et al., and U.S. Pat. No. 4,845,430 to Nakagayashi. For the present invention, among the functions of the MRI apparatus, the function to create an electromagnetic field is useful for the present invention. The implanted medical device of the present can be located as usually done for MRI imaging, and then an electromagnetic field is created by the MRI apparatus to facilitate release of the biologically active material. The duration of the procedure depends on many factors, including the desired releasing rate and the location of the inserted medical device. One skilled in the art can determine the proper cycle of the electromagnetic field, proper intensity of the electromagnetic field, and time to be applied in each specific case based on experiments using an animal as a model.”

[0624] Published United States patent application 2004/0030379 also disclose that “In addition, one skilled in the art can determine the excitation source frequency of the elecromagnetic energy source. For example, the electromagnetic field can have an excitation source frequency in the range of about 1 Hertz to about 300 kiloHertz. Also, the shape of the frequency can be of different types. For example, the frequency can be in the form of a square pulse, ramp, sawtooth, sine, triangle, or complex. Also, each form can have a varying duty cycle.”

[0625] Referring again to FIG. 1, and in the preferred embodiment depicted therein, a layer of drug eluting polymer 49 is present in the stent assembly; and this polymer may be used to either attract anti-mitotic agent into it, and/or to elute anti-mitotic agent out of it.

[0626] In one preferred embodiment, direct current electrical energy is delivered via lines 36/38 to to stent assembly 16. In this emboidment, it is preferred that stent assembly 16 be comprised of conductive material, and that the stent also be comprised of wire-like struts (see, e.g., FIG. 1 of published United States patent application 2004/0030379).

[0627] As will be apparent, as the direct current flows through the conductive material, it creates a static magnetic field in accordance with the well-known Lenz's law. In one embodiment, with the blood flow that is typical through the blood vessels of human beings, magnetic fields on the order of about 1 Gauss can readily be created.

[0628] Referring again to FIG. 1, the stent assembly 16 is preferably comprised of a metallic stent body 16 and, disposed thereon, drug eluting polymer 49. The hydrodynamic forces caused by the flow of blood through the stent assembly 16 causes elution of particles 14 of anti-mitotic agent.

[0629] It is preferred that regulator 30 be comprised of either a half wave or a full wave rectifier so that the current flowing from regulator 30 be direct current, i.e., that such current flow in only one direction. As will be apparent with either “half-wave d.c.” and/or “full-wave d.c.” being fed to the stent 16, a magnetic field will be induced in such stent that will have a constant polarity but constantly varying intensity. Such a magnetic field with either consistently attract and/or repel the magnetic anti-mitotic particles 14, depending upon the magnetic polarity of such particles. In one preferred embodiment, the magnetized stent 16 consistently attracts the magnetic particles 14.

[0630] As will be apparent, the regulator is capable of varying the intensity and/or polarity of its output, preferably in response to a signal from the controller 32. The controller 32 is preferably equipped with an antenna 50 which is in telemetric contact with both the regulator 30 and the sensors 42, 44, 46, and 48.

[0631] The sensors 42, 44, 46, and 48 may be any of implantable biosensors known to those skilled in the art.

[0632] By way of illustration, and referring to U.S. Pat. No. 4,915,113 (the entire disclosure of which is hereby incorporated by reference into this specification), the sensor(s) may be a implantable Dopper flow meter apparatus for monitoring blood flow through a vascular graft. This patent claims: “1. Implantable flow meter apparatus for monitoring vascular graft patency comprising: (a) at least one ring member for surrounding a blood vessel graft intermediate its ends, said at least one ring member supporting transducer means thereon to define an axis extending internal of said blood vessel graft when said at least one ring member is installed on said blood vessel graft; (b) implantable electrical means positionable subcutaneously at a predetermined access site displaced from said one at least one ring member; (c) conductor means coupling said transducer means to said electrical means; and (d) barrier patch means having an area much greater than the cross-sectional area of said conductor means, said conductor means passing generally through the center of said patch means for inhibiting passage of infection producing organisms from said access site along said conductor means.”

[0633] The sensor(s) may comprise a means for sensing the strength of a magnetic field. As is disclosed in claim 4 of U.S. Pat. No. 5,562,714 (the entire disclosure of which is hereby incorporated by reference into this specification), the sensing means “ . . . comprises a sensing antenna having an electrical connection through diodes to a power supply so that the Q of said transmitting antenna is regulated by draw down of energy by said sense antenna through said diode connection to said power supply.

[0634] In one embodiment, depicted in FIG. 3, the energy fed via line 24 is direct-current electrical energy.

A Process for Predicting Mutation Type and Mutation Frequency

[0635] In one embodiment of applicants' invention, there is provided a process for predicting both the type and frequency of mutations in certain protein drug targets.

[0636] As is known to those skilled in the art, many mutations are “silent,” i.e., they do not result in amino acid changes in the protein being expressed. Put another way, a silent mutation is a mutation that does not result in a detectable phenotypic effect. A silent mutation may be due to a transition or a transversion that leads to synonym codon. Additionally, mutations can change a codonto code for an amino acid closely related in terms of shape, hydrophobicity or other properties to that coded for by the original codon. Reference may be had, e.g., to U.S. Pat. Nos. 5,240,846 5,639,650; 5,840,493 (mitochondrial DNA mutations); U.S. Pat. No. 5,976,798 (methods for detecting mitochondrial mutations); U.S. Pat. No. 6,010,908(gene therapy by small fragment homologous replacement); U.S. Pat. No. 6,329,138 (method for the detection of antibiotic resistance); U.S. Pat. No. 6,344,356 (methods for recombining nucleic acids); U.S. Pat. No. 6,544,745 (diagnostic assay for diabetes); U.S. Pat. No. 6,699,479; and the like. The entire disclosure of each of these United States patents is hereby incorporated by reference into this specification.

[0637] An additional preferred embodiement is an algorithm using artificial intelligence or computer programs that improve their performance based on information gathered from previous cycles to predict which DNA bases are most likely to be mutated and result in important amino acid changes. This information can be derived empirically from data gathered by the sequencing of tubulin mutants from clinical samples of tumors.

[0638] As is also known to those skilled in the art, the active site of a protein is assembled from many amino acids that interact with the substrate of the enzymatic reaction or ligand binding reactions. In one embodiment of applicants' invention, one can anticipate which amino acid changes will result in a change in drug binding. In one aspect of this embodiment, one anticipates which amino acid changes result in changes in drug binding in paclitaxeal and, thereafter, designs drugs to bind to the modified binding sites. In this aspect, by utilizing such drugs in advance of the mutation event, or concurrently therewith, the incidence of selecting for resistant forms of cancer is minimized.

[0639] Applicants' process 200 is schematically illustrated in FIG. 3. In step 202 of the process, the structure of the target protein is obtained. The target protein may, e.g., be a beta-tubulin that is implicated in, e.g., certain drug resistance.

[0640] One may obtain the structure of the target protein by conventional or unconventional means. One, thus, may conduct conventional x-ray crystallography analysis of the protein in question. Alternatively, or additionally, one may obtain and/or confirm the structure of the protein in question by homology modeling, as is discussed elsewhere in this specification.

[0641] Thereafter, in step 204 of the process, the binding efficiency of a candidate drug to the target protein is predicted by conventional means. One may use the means disclosed in U.S. Pat. No. 5,854,992 (system and method for structure-based drug design that includes accurate prediction of binding free energy); U.S. Pat. No. 5,933,819 (prediction of relative biding moits of biologically active peptides and peptide mimetics); U.S. Pat. No. 6,226,603 (method for the prediction of binding targets and the design of ligands); U.S. Pat. No. 6,772,073 (method for prediction of binding targets and the design of ligands); and the like. The entire disclosure of each of these United States patents is hereby incorporated by reference into this specification.

[0642] By way of illustration, and referring to U.S. Pat. No. 5,854,992, such patent claims: “1. A method for building molecules for binding at a receptor site, comprising the steps of: (a) evaluating a receptor site for a molecular make up of at least a portion of the receptor site to which a molecule being grown will bind and generating at least a coordinate of at least a portion of the receptor site to which the molecule being grown will bind, and outputting, at least with respect to the molecular make up of the receptor site, the coordinate of the portion of the receptor site to which the molecule being grown will bind; (b) estimating free energy of the molecule being grown using knowledge-based potential data to estimate free energy and outputting the estimated free energy; and (c) building a molecule for binding to the receptor site using the outputs from steps (a) and (b), with the building step including building the molecule by selecting molecular fragments at orientations that will result in free energy estimates for the molecule that may be higher than a lowest free energy estimate possible for the molecule.”

[0643] Thereafter, in step 206 of the process, the key amino acids that are essential for the interaction of the target protein and the candidate drug are identified. This step also may be conducted by conventional means, such as evaluation of the results of the energy minimization analyses preferably conducted in step 204.

[0644] In step 208 of the process, a slight variation in the homology model is made in order to determine how the modified model will function. Thus, e.g., one may modify the target protein used in step 202, and then the process is repeated to determine the binding efficiency of the candidate drug (in step 204) for the modified target protein. The process is then repeated again, and again, until a multiplicity of sets of data are obtained with a multiplicity of different target proteins for the same drug.

[0645] This multiplicity of data will indicate which target protein the drug is most efficiently bound to the candidate drug, and which target protein is least efficiently bound to the target drug. The least efficiently bound target proteins are those proteins that, through natural selection of cells, might cause drug resistance to the candidate drug. Thus, in step 210, the data from repeated runs of process 200 is evaluated to determine which of the target proteins are least likely to bind to the candidate drug.

[0646] In step 212, the candidate drug is modified, and the modified drug is then tested again in the cyle of steps 202/204/206/208 to determine its binding efficiency with each of the target proteins initially evaluated as well as other modified target proteins.

[0647] This process may lead to other modified candidate drugs. The goal is to test for, and determine, the existence of a modified drug that has a high binding efficiency for all of the targeted protein structures.

[0648] As will be apparent, the process depicted in FIG. 3 may be used to determine drugs that may minimize drug resistance to anti-mitotic agents; and these “modified drugs” may be used either by themselves and/or in combination with the original cancer drug, depending upon the relative binding efficiencies with regard to particular target proteins and the extent to which the use of such drugs results in synergy. As will also be apparent, the process depicted in FIG. 3 may be used to determine drugs that may minimize other drug resistance caused by natural selection, such as antibiotic drug resistance. The process may also be used in cases of herbicide resistance, pesticide resistance, resistance to antiviral drugs, etc.

[0649] FIG. 4 is a flow diagram of one particular process 220 involving the design of anti-mitotic drugs and, in one embodiment thereof, combinations of antimitotic drugs. Referring to FIG. 4, and in step 222 thereof, the mutant proteins that are resistant to certain anti-mitotic agents are identified. These mutant proteins can be identified by conventional means such as, e.g., those means described hereinbelow, which relate to the identification of mutant tubulin isotypes.

[0650] Some of these mutant tubulin isotypes are discussed in published United States patent application 2004/0121351, the entire disclosure of which is hereby incorporated by reference into this specification. This published United States patent application discloses that: “The conservation of structure and regulatory functions among the β-tubulin genes in three vertebrate species (chicken, mouse and human) allowed the identification of and categorization into six major classes of beta-tubulin polypeptide isotypes on the basis of their variable carboxyterminal ends . . . . As tubulin molecules are involved in many processes and form part of many structures in the eucaryotic cell, they are possible targets for pharmaceutically active compounds. As tubulin is more particularly the main structural component of the microtubules it may act as point of attack for anticancer drugs such as vinblastin, colchicin, estramustin and taxol which interfere with microtubule function. The mode of action is such that cytostatic agents such as the ones mentioned above, bind to the carboxyterminal end the β-tubulin which upon such binding undergoes a conformational change. For example, Kavallaris et al. [Kavallaris et al. 1997, J. Clin. Invest. 100: 1282-1293] reported a change in the expression of of specific β-tubulin isotypes (class I, II, III, and IVa) in taxol resistant epithelial ovarian tumor. It was concluded that these tubulins are involved in the formation of the taxol resistence. Also a high expression of class III β-tubulins was found in some forms of lung cancer suggesting that this isotype may be used as a diagnostic marker.”

[0651] The function of certain tubulins in paclitaxel resistance was also discussed in U.S. Pat. No. 6,362,321, the entire disclosure of which is hereby incorporated by reference into this specification. As is disclosed in this patent, “Taxol is a natural product derived from the bark of Taxus brevafolio (Pacific yew). Taxol inhibits microtubule depolymerization during mitosis and results in subsequent cell death. Taxol displays a broad spectrum of tumorcidal activity including against breast, ovary and lung cancer (McGuire et al., 1996, N. Engld. J. Med. 334:1-6; and Johnson et al., 1996, J. Clin. Ocol. 14:2054-2060). While taxol is often effective in treatment of these malignancies, it is usually not curative because of eventual development of taxol resistance. Cellular resistance to taxol may include mechanisms such as enhanced expression of P-glycoprotein and alterations in tubulin structure through gene mutations in the B chain or changes in the ratio of tubulin isomers within the polymerized microtubule (Wahl et al., 1996, Nature Medicine 2:72-79; Horwitz et al., 1993, Natl. Cancer Inst. 15:55-61; Haber et al., 1995, J. Biol. Chem. 270:31269-31275; and Giannakakou et al., 1997, J. Biol. Chem. 272:17118-17125) . . . ”

[0652] The increased presence of certain tubulin isotypes associated with certain types of cancers was noted in an article by Tien Yeh et al., “The B_{II} Isotype of Tubulin is Present in the Cell Nuclei of a Variety of Cancers,” Cell Motility and the Cytoskeleton 57:96-106 (2004). The Yeh et al. article discloses that both alpha-tubulin and beta-tubulin consist of a series of isotypes differing in amino acid sequence, each one encoded by a different gene; and it refers to a 1998 article by Richard F. Luduena entitled “The multiple forms of tubulin: different gene products and covalent modifications,” Int. Rev. Cytol 178:207-275. The Yeh et al. article also disclosed that the B_{II} isotype of tubulin is present in the nuclei of many tumors, stating that “Three quarters (75%) of the tumors we examined contained nuclear the B_{II} (Table I).” The authors of the Yeh et al. article suggest that (at page 104) “ . . . it would be interesting to expore the possibility of using nuclear B_{II} as a chemotherapeutic target.”

[0653] The aforementioned articles disclose several conventional means for identifying mutant proteins that are a cause, at least in part, of anti-mitotic drug resistance. Comparable means may be used to identify mutant proteins that are the cause of antibioitic drug resistance, vaccine resistance, herbicide reistance, pesticide resistance, antiviral drug resitance, and the like. In general, one may study specimens of drug resistant orgnanisms to determine the existence of prorteins that are preferentially expressed in the drug resistant organisms as compared with a comparable non-drug resistant organisms. Additionally, or alteratively, one may determine the existence of proteins that are preferentially expressed in the diseased organisms in order to determine whether such proteins are essential for the progress of the disease. Means for making such determinations are well documented in the patent literature. Reference may be had, e.g., to U.S. Pat. No. 5,853,995 (large scale genotyping of diseases); U.S. Pat. No. 6,162,604 (methods for determining genetic predisposition to automimmune disease by genotypying apoptotic genes); U.S. Pat. No. 6,291,175 (methods for treating a neurological disease by determining BCHE genotype); U.S. Pat. No. 6,303,307 (large scale genotyping of disease); U.S. Pat. Nos. 6,355,859; 6,432,643 (method of determining Alzheimer's disease risk using apolipoprotein E4 genotype analysis); U.S. Pat. No. 6,573,049 (genotyping of the paraoxonase 1 gene for prognosing, diagnosing, and treating a disease); and the like. The entire disclosure of each of these United States patents is hereby incorporated by reference into this specification.

[0654] Referring again to FIG. 4, and in step 224 thereof, certain candidate drugs are then identified that will bind to the mutant proteins. This can be done with the process depicted in FIG. 3.

[0655] It is often the case that more than one mutant protein is present in cases of drug resistance. As is known, cancer often has a heterogeneous genotype in which different isotopes preferentially contain different drug-resistant proteins. In such a case, it is often desirable to determine not only which candidate drugs will bind to the particular mutant protein (see step 222), but also what combination of drugs will effectively bind to all the mutant proteins present in the heterogeneous genotype. Furthermore, one should also determine the concentration(s) and/or ratios of such drugs to maximize the possibility of a synergistic therapeutic effect.

[0656] After the identity and concentration of the drugs to be used has been determined, one can can either administer these drugs simultaneously (in step 228) and/or administer these drugs sequentially (in step 230). Additionally, or alternatively, in step 232 one may administer non-drug therapy either the same time as the administration of the drug(s), and/or at one or more different times.

[0657] One may use one or more of non-drug anti-mitotic therapies that are known to those skilled in the art. Thus, e.g., in step 234 one may use hyperthermia. With the use of the magnetic anti-mitotic drugs discussed elsewhere in this specification, one may direct these drugs to the site of a tumor with the aid of an external electromagnetic field and thereafter, with the use of one or more other electromagnetic fields, cause such drug(s) to heat up to its Curie temperature and preferentially damage and/or destroy cancer cells. In one aspect of this embodiment, the Curie temperature of the magnetic anti-mitotic compound is less than about 41 degrees Celsius.

[0658] One may use radiation therapy in step 236. Thus, e.g., the magnetic anti-mitotic drug of this invention may contain a radioactive moiety, such as radioactive iron, or radioactive cobalt.

[0659] One may use ultrasound therapy is step 238. This step is described in more detail in the next section of this specification.

Treatment of In Vivo Tumors with high Frequency Energy

[0660] FIG. 5 is a flow diagram of a preferred process 260 for treating a biological organism with ultrasound, as set forth in step 238 of FIG. 4. In addition to the ultrasound energy, one may use other forms of mechanical energy, some of which are disclosed in published United States patent application 2004/0030379.

[0661] Referring to published United States patent application 2004/0030379, the entire disclosure of which is hereby incorporated by reference into this specification, “The mechanical vibrational energy source includes various sources which cause vibration such as ultrasound energy. Examples of suitable ultrasound energy are disclosed in U.S. Pat. No. 6,001,069 to Tachibana et al. and U.S. Pat. No. 5,725,494 to Brisken, PCT publications WO0016704, WO018468, WO0000095, WO0007508 and WO9933391, which are all incorporated herein by reference. Strength and duration of the mechanical vibrational energy of the application may be determined based on various factors including the biologically active material contained in the coating, the thickness of the coating, structure of the coating and desired releasing rate of the biologically active material.”

[0662] As is also disclosed in published United States patent application 2004/0030379, “Various methods and devices may be used in connection with the present invention. For example, U.S. Pat. No. 5,895,356 discloses a probe for transurethrally applying focused ultrasound energy to produce hyperthermal and thermotherapeutic effect in diseased tissue. U.S. Pat. No. 5,873,828 discloses a device having an ultrasonic vibrator with either a microwave or radio frequency probe. U.S. Pat. No. 6,056,735 discloses an ultrasonic treating device having a probe connected to an ultrasonic transducer and a holding means to clamp a tissue. Any of those methods and devices can be adapted for use in the method of the present invention.”

[0663] As is also disclosed in published United States patent application 2004/0030379, “Ultrasound energy application can be conducted percutaneously through small skin incisions. An ultrasonic vibrator or probe can be inserted into a subject's body through a body lumen, such as blood vessels, bronchus, urethral tract, digestive tract, and vagina. However, an ultrasound probe can be appropriately modified, as known in the art, for subcutaneous application. The probe can be positioned closely to an outer surface of the patient body proximal to the inserted medical device.”

[0664] As is also disclosed in published United States patent application 2004/0030379, “The duration of the procedure depends on many factors, including the desired releasing rate and the location of the inserted medical device. The procedure may be performed in a surgical suite where the patient can be monitored by imaging equipment. Also, a plurality of probes can be used simultaneously. One skilled in the art can determine the proper cycle of the ultrasound, proper intensity of the ultrasound, and time to be applied in each specific case based on experiments using an animal as a model.”

[0665] As is also disclosed in published United States patent application 2004/0030379, “In addition, one skilled in the art can determine the excitation source frequency of the mechanical vibrational energy source. For example, the mechanical vibrational energy source can have an excitation source frequency in the range of about 1 Hertz to about 300 kiloHertz. Also, the shape of the frequency can be of different types. For example, the frequency can be in the form of a square pulse, ramp, sawtooth, sine, triangle, or complex. Also, each form can have a varying duty cycle.

[0666] Referring again to FIG. 5, and in step 262 of this process, microtubules in diseased cells are preferably stabilized by one or more conventional means. Thus, e.g., one may effectuate such stabilization by using anti-mitotic or other chemical agents known to affect microtubules, or using chemicals that influence proteins that aid in the stabilization of microtubules (e.g. Rho or FAK), or a process of post-translational modification to the tubulin protein, until the half-life of an individual microtubule in the mitotic spindle of a dividing cell is an average of at least 8 minutes, or more than 10 percent of the microtubules in a non-dividing cell have a half-life of more than 8 minutes. One may use standard means for stabilizing the microtubules to this extent. Thus, e.g., reference may be had to U.S. Pat. No. 5,808,898 (method of stabilizing microtubules); U.S. Pat. Nos. 5,616,608; 6,403,635; 6,414,015 (laulimalide microtubule stabilizing agents); U.S. Pat. Nos. 6,429,232; 6,500,859 (method for treating atherosclerosis or restenosis using microtubule stabilizing agent); U.S. Pat. No. 6,660,767 (coumarin compounds as microtubules stabilizing agents); U.S. Pat. No. 6,740,751 (methods and compositions for stabilizing microtubules and intermediate filaments); and the like. The entire disclosure of each of these United States patents is hereby incorporated by reference into this specification.

[0667] In step 264 of this process, the resonant frequency of the stabilized microtubules in the diseased cells to be treated is determined. As used herein, the term “resonant frequency” is that frequency which, at a power level of 10 milliwatts per square centimeter, a temperature of 37 degrees Celsius, and atmospheric pressure, is sufficient to break at least 50 weight percent of the microtubules in the cell after an exposure time of five (5) minutes. That frequency which breaks the maximum number of microtubules under these conditions is the resonant frequency.

[0668] In this process, one may use any of the means for generating and focusing ultrasound energy that are known to those skilled in the art. Thus, e.g., one may use the ultrasound generator disclosed in U.S. Pat. No. 6,685,639, the entire disclosure of which is hereby incorporated by reference into this specification. This patent claims: “A high intensity focused ultrasound system, comprising: a controllable power supply; a B-mode ultrasound scanner; a therapeutic bed having a through hole; a liquid bag placed in the through hole and having opposite upper and lower portions, the lower portion of the liquid bag being attached to a combined probe, whereby a body portion of a patient lying immediately above the through hole may be scanned and treated by said system; and the combined probe comprising: a therapeutic head coupled to said controllable power supply for generating and focusing a ultrasound beam on a focal region at a temperature greater than 70 degrees centigrade, said therapeutic head comprising a ultrasound lens and piezoelectric ceramics coupled to said controllable power supply and disposed beneath the ultrasound lens, and an imaging probe coupled to said B-mode ultrasound scanner and mounted on a central axis of said therapeutic head so that the focal region of said therapeutic head is fixed at a predetermined location on a scanning plane; wherein said liquid bag contains vacuum degassed water having an acoustic impedance similar to that of human tissue, the upper portion of said liquid bag including an opening exposing said vacuum degassed water, said opening being open to an upper surface of said therapeutic bed so as said vacuum degassed water is adapted to be placed in direct contact with the skin of the patient's body portion; said system further comprising a multi-dimensional motional apparatus, on which the combined probe is mounted and which is moveable along three-dimensional rectangular coordinate axes and rotatable about one or two rotational coordinate axes, for driving said combined probe, said multidimensional motional apparatus includes a plurality of one-dimensional motional devices each being configured to either translate or rotate said combined probe in a specific direction.”

[0669] By way of yet further illustration, and not limitation, one may use one or more of the ultrasound generators described in U.S. Pat. No. 3,735,756 (duplex ultrasound generator); U.S. Pat. No. 4,718,421 (ultrasound generator); U.S. Pat. No. 4,957,100 (ultrasound generator and emitter); U.S. Pat. No. 4,976,255 (extracorporeal lithotripsy using shock waves and therapeutic ultrasound); U.S. Pat. Nos. 5,102,534; 5,184,065 (therapeutic ultrasound generator); U.S. Pat. No. 5,443,069 (therapeutic ultrasound applicator for the urogenital region); U.S. Pat. No. 6,270,342; and the like. The entire disclosure of each of these United States patents is hereby incorporated by reference into this specification.

[0670] By way of further illustration, one may also use the ultrasound generator disclosed in an article by article by 1. Hrazdira et al., “Ultrasonicallly inducted altrations of cultured tumour cells,” European Journal of Ultrasound 8: 43-49, 1998. At page 45 of this article, is it disclosed that: “A laboratory generator operating at a frequency of 0.8 MHz was used as the source of continuous ultrasound.”

[0671] Applicants have discovered that the the resonant freqency will will vary with the square root of the average length of the microtubules in the cells being treated. They have also discovered that the microtubules in diseased cells do not necessarily have the same length as the microtubules in non-diseased cells. It is believed, e.g., that cancer cells have microtubules that are up to about 10 percent longer than the microtubules of comparable non-cancer cells.

[0672] Referring to FIG. 5, and to step 264 thereof, a series of experiments are preferably conducted with ultrasound waves with a power level of 10 milliwatts per square centimeter and different frequencies, at temperature of 37 degrees Celsius, and atmospheric pressure, and then the breakage of microtubules caused by such exposure is determined. That frequency which breaks the maximum number of microtubules is the resonant frequency.

[0673] One may determine the extent to which any particular ultrasound wave breaks microtubules by conventional means. Thus, e.g., one may use the means described in the afrorementioned article by I. Hrazdira et al., in section 2.3 thereof. As is disclosed in such article, “For visualization of cytoskeleton components, an indirect immunofluorescence method was used. The cells in the monolayer were washed with phosphate buffer before adding 0.1% Triton for stabilization of membrane permeability. The cells were subsequently fixed by means of 3% paraformaldeyde. After fixation, secondary antibodies were added for 45 min . . . for microtubules . . . . Between each operation, the cells were washed by PBS. Finally, samples for fluorescene microscopy were prepared . . . . A total of 20 microphotographs of each controal and experimental sample were evaluated anonymously . . . . Changes in cytoskeletal structre were evaluated quantitatively . . . . ”

[0674] Referring again to FIG. 5, and in step 266 of the process, the stabilized microtubules are then contacted with ultrasound energy.

[0675] In one embodiment, the frequency of the ultrasound energy is approximately the resonant frequency, plus or minus about ten percent. In one aspect of this embodiment, the frequency of the ultrasound energy is approximately the resonant frequency, plus or minus about 5 percent. In general, such frequency will often be in the range of from about 100 kilohertz to about 500 kilohertz and, more preferably, from about 110 to about 200 kilohertz. In yet antoher embodiment, such frequency is from about 130 to about 170 kilohertz.

[0676] The power used for such exposure is preferably from about 1 to about 30 milliwatts per square centimeter and, more preferably, from about 5 to about 15 milliwatts per square centimeters.

[0677] At page 46 of the aforementioned Hrazdira et al. article, it was disclosed that “The disassembly of cytoskeleton components was not permanent. According to the time interval between sonication and cell fixation, a partial (at higher intensities) or total (at lower intensitivies) recovery of the cytoskeleton took place.” At page 49 of the Hradzdira et articles, it was disclosed that “We did not find any changes in the cells that could be entirely attributed to ultrasound action only. From the point of view of cytoskeletal alterations, ultrasound has to be considered as a non-specific stress factor.”

[0678] To help insure that applicants' process is more effective in causing permanent changes in the cell, an in step 268, the ultrasound excitation of the stabilized microtubules is ceased when the temperature of such microtubules reaches a specified temperature such as, e.g., a temperature of 70 degrees Celsius.

[0679] U.S. Pat. No. 6,685,639, the entire disclosure of which is hereby incorporated by reference into this specification, describes and claims “a high intensity focused ultrasound system for scanning and treating tumor” which creates a very high temperature (in excess of 70 degrees Celsisus) in the area of the “focal region.” As is disclosed in column 3 of this patent, “By means of focusing, the sytem causes ultrasonic waves to form a space-point with high energy (focal region); the energy of the region reaches over 1000 W/M² and the temperature instaneously rises to greater than 70 degrees centigrade . . . . ”

[0680] Applicants wish to avoid prolonged exposure of the cells of living organisms to a temperature in excess of a specified temperature, such as, e.g., 42 degrees Celisus. Thus, when the temperature of the microtubules reaches such specified temperature, and in step 268, the process of ultrasound excitation is repeated.

[0681] Thereafter, in step 270, step 266 (the contacting of the stabilized microtubules with ultrasound energy) is repeated until the temperature of the microtubules reaches the aforementioned maximum temperature, at which point step 268 is repeated (in step 272). The cycle is continued for as many times as is necessary to induce apoptosis.

[0682] In one embodiment, step 266 is conducted for from about 1 to about 5 minutes, the microtubules are allowed to cool, and then such step 266 is repeated again and again.

Nuclear Localization Sequences

[0683] U.S. Pat. No. 6,495,518, the entire disclosure of which is hereby incorporated by reference into this specification, describes the addition of “peptide localization sequences.” This patent, which is entitled “Method for importing biologically active molecules into cells, discloses that: “Peptides have been developed for many therapeutic uses. For example, diseases currently targeted by new peptide drugs include heart conditions, cancers, endocrine disorders, neurological defects, respiratory conditions, allergies and autoimmune diseases. Although the manufacture of known therapeutic peptides can be achieved by known methods, i.e., classic synthetic techniques or recombinant genetic engineering, delivery of the peptides into a cell has remained problematic, since they cannot readily cross biological membranes to enter cells. Thus, current methods include permeabilization of the cell membrane, or microinjection into the cell. Both of these methods have serious drawbacks. Permeabilization of cells, e.g., by saponin, bacterial toxins, calcium phosphate, electroporation, etc., can only be practically useful for ex vivo methods, and these methods cause damage to the cells. Microinjection requires highly skilled technicians (thus limiting its use to a laboratory setting), it physically damages the cells, and it has only limited applications as it cannot be used to treat for example, a mass of cells or an entire tissue, because one cannot feasibly inject large numbers of cells.”

[0684] U.S. Pat. No. 6,495,518 also discloses that: “Similarly, delivery of nucleic acids has been problematic. Methods currently employed include the permeabilization described above, with the above-described drawbacks, as well as vector-based delivery, such as with viral vectors, and liposome-mediated delivery. However, viral vectors can present additional risks to a patient, and liposome techniques have not achieved satisfactorily high levels of delivery into cells.”

[0685] U.S. Pat. No. 6,495,518 also discloses that “Signal peptide sequences . . . which share the common motif of hydrophobicity, mediate translocation of most intracellular secretory proteins across mammalian endoplasmic reticulum (ER) and prokaryotic plasma membranes through the putative protein-conducting channels. 2-11 Alternative models for secretory protein transport also support a role for the signal sequence in targeting proteins to membranes . . . . Several types of signal sequence-mediated inside-out membrane translocation pathways have been proposed. The major model implies that the proteins are transported across membranes through a hydrophilic protein conducting channel formed by a number of membrane proteins. 2-11 In eukaryotes, newly synthesized proteins in the cytoplasm are targeted to the ER membrane by signal sequences that are recognized generally by the signal recognition particle (SRP) and its ER membrane receptors. This targeting step is followed by the actual transfer of protein across the ER membrane and out of the cell through the putative protein-conducting channel (for recent reviews, see references 2-5). In bacteria, the transport of most proteins across the cytoplasmic membrane also requires a similar protein-conducting channel. 7-11 On the other hand, signal peptides can interact strongly with lipids, supporting the proposal that the transport of some secretory proteins across cellular membranes may occur directly through the lipid bilayer in the absence of any proteinaceous channels . . . . ”

[0686] U.S. Pat. No. 6,495,518 also discloses that “Thus, though many attempts have been made to develop effective methods for importing biologically active molecules into cells, both in vivo and in vitro, none has proved to be entirely satisfactory.” The solution to this problem, presented in claim 1 of the patent, is: “A method of importing a nuclear localization sequence of NF-.kappa.B into a cell in a subject, comprising administering a cyclic peptide consisting essentially of . . . to the subject, wherein said cyclic peptide is imported into a cell in the subject.”

[0687] The process described in U.S. Pat. No. 6,495,518 may be used in conjunction with one or more of the therapeutic agents described elsewhere in this disclosure. In particular, such process may be used in conjunction with the nuclear localization sequence (NLS) which directs a moiety, to which it is attached, to the nucleus of the cell. The NLS is a short peptide usually, (but not limited to) 4 to 8 amino acid residues usually, but not limited to, highly charged species such as lysine or arginine, which can be covalently bound to the therapeutic molecule or other chemical of interest.

[0688] Nuclear localization sequences are well known to those skilled in the art. Thus, by way of illustration, reference may be had to U.S. Pat. No. 6,521,456, the entire disclosure of which is hereby incorporated by reference into this specification. This patent is enitled “Cellular transport system for the transfer of a nucleic acid through the nuclear envelope and methods thereof,” it discloses a method to use NLSs to transport transgenic nucleic acid molecules to the nucleus, and it claims “a nuclear transport agent for transferring a nucleic acid from cytoplasm into a nucleus of a eukaryotic cell comprising a first module and a second module, wherein the first module is module A that binds specifically to a DNA molecule so as not to form complexes consisting of more than one DNA molecule, and wherein the second module is module B that comprises an extended nuclear localization signal having a charge thus preventing the second module from mediating nonspecific binding of the nuclear transport agent to the DNA molecule.”

[0689] By way of yet further illustration, nuclear localization signals are described in U.S. Pat. Nos. 5,576,201; 5,580,766; 5,670,347; 5,712,379; 5,736,392; 5,770,581; 5,783,420; 5,795,587; 5,891,718; 5,973,116; 5,994,512; 6,033,856; 6,057,101; 6,106,825; 6,159,691; 6,165,720; 6,203,968; 6,222,095; 6,235,521 (phage bonded to nuclear location signal); U.S. Pat. Nos. 6,235,526; 6,297,253; 6,300,120 (phage with nuclear localization signal); U.S. Pat. Nos. 6,333,127; 6,372,720; 6,379,927; 6,465,246; 6,472,176; 6,476,296; 6,479,284; 6,521,456; 6,576,758; 6,586,240; 6,649,797; 6,664,368; 6,720,310; 6,746,868; 6,759,231 (phage with nuclear localization signal); U.S. Pat. Nos. 6,770,477; 6,777,544; and the like. The entire disclosure of each of thee United States patent is hereby incorporated by reference into this specification.

[0690] By way of yet further illustration, a database of nuclear localization signals is available at http://cubic.bioc.columbia.edu/db/NLSdb/ in which these experimentally derived NLSs are described by their peptide sequence letter amino acid code:

| SEQ. NO. | Amino Acid Code |
|---|---|
| SEQ. ID. NO. 316 | [de][kr]rr[kr][fyw] |
| SEQ. ID. NO. 317 | [de][rk]{2,4}[ga]r[pl][ga] |
| SEQ. ID. NO. 318 | [de][rk]{3,}?x[kr]{2,}?[pl] |
| SEQ. ID. NO. 319 | [de][st][pl]kr[stc] |
| SEQ. ID. NO. 320 | [de]k[nif]rr[dek][stmnq] |
| SEQ. ID. NO. 321 | [de]kk[pl][gl]k[gl] |
| SEQ. ID. NO. 322 | [de]kr[mqn]r[mqn]r |
| SEQ. ID. NO. 323 | [de]kxrrk[mnq] |
| SEQ. ID. NO. 324 | [de]rkrr[deplq] |
| SEQ. ID. NO. 325 | [de]rxkkkk |
| SEQ. ID. NO. 326 | [de]r{2,4}xrk[pl] |
| SEQ. ID. NO. 327 | [ed]r{4,}?[ed] |
| SEQ. ID. NO. 328 | [ga][kr]krx[kr][ga] |
| SEQ. ID. NO. 329 | [ga]kxkkk[mnq] |
| SEQ. ID. NO. 330 | [ga]rx[rk]x[rk][rk]x[qm] |
| SEQ. ID. NO. 331 | [gaplv]rkrkkr |
| SEQ. ID. NO. 332 | [kar]tpiqkhwrptvltegppvkirietgewe[ka] |
| SEQ. ID. NO. 333 | [kr][de][kr][de]xx[kr]{4,}? |
| SEQ. ID. NO. 334 | [kr][kr][kr][kr][kr][kr][kr] |
| SEQ. ID. NO. 335 | [kr][kr][qmn]r[rk][qmn]r |
| SEQ. ID. NO. 336 | [kr][kr]x[kr][kr][kr]x[kr][kr] |
| SEQ. ID. NO. 337 | [kr]g{2,}?xxg{3,}?[rk] |
| SEQ. ID. NO. 338 | [kr]krkk |
| SEQ. ID. NO. 339 | [kr]xxknkx{6,8}k[kr] |
| SEQ. ID. NO. 340 | [kr]{2,3}xxkr[kr][qlm] |
| SEQ. ID. NO. 341 | [kr]{2,}?[pl]x{1,4}[kr]{2,}?x{1,5}k{3,}? |
| SEQ. ID. NO. 342 | [kr]{2}x{0,1}[kr]{2,4}x{25,34}k{2,4}x{1,2}k |
| SEQ. ID. NO. 343 | [kr]{4}x{20,24}k{1,4}xk |
| SEQ. ID. NO. 344 | [lf][stk][viqm][kr]r[qmvi][stk]l |
| SEQ. ID. NO. 345 | [mi]vwsrd[heq]rrk |
| SEQ. ID. NO. 346 | [pl][kr]{5,7}[pl] |
| SEQ. ID. NO. 347 | [pl][pl]x[kr]r[de][kr][qst] |
| SEQ. ID. NO. 348 | [pl][rk][rk][dep]r[rk][fyw] |
| SEQ. ID. NO. 349 | [pl][rk][rk][kr][gapl][rk][stqm] |
| SEQ. ID. NO. 350 | [pl][rk]{2,3}k[pli][rk]x[pli]xk |
| SEQ. ID. NO. 351 | [pl]kxxkrr |
| SEQ. ID. NO. 352 | [pl]r[de]k[de]r |
| SEQ. ID. NO. 353 | [pl]rkrk[pl] |
| SEQ. ID. NO. 354 | [pl]xxkr[iv]k[pl][de] |
| SEQ. ID. NO. 355 | [plq][kr]x{3,4}kkrk |
| SEQ. ID. NO. 356 | [plq]k[rk]x{1,2}[rk]x{3,6}[rk][rk]x{1, |
| | 2}[rk]x{1,2}[rk][rk] |
| SEQ. ID. NO. 357 | [plqmkr]r[kr][qm][kr]rxk |
| SEQ. ID. NO. 358 | [plqmnkr]k[kr][kr]rxk[plqmnkr] |
| SEQ. ID. NO. 359 | [plv]k[rk]x[qmn][rk]r |
| SEQ. ID. NO. 360 | [plv]k[rk]x[rk][rk][rk][pl] |
| SEQ. ID. NO. 361 | [plv]rk[st]r[de]k |
| SEQ. ID. NO. 362 | [pvli][rk][rk][rk][rk][rk][qmn]k |
| SEQ. ID. NO. 363 | [ql]k{2,4}x{8,12}[rk][ql][rk][ql]kr |
| SEQ. ID. NO. 364 | [ql]xkrxkxkk |
| SEQ. ID. NO. 365 | [qmn]r[rk]xkx[rk][rk] |
| SEQ. ID. NO. 366 | [rk][pliv][kr][rk]{2,4}[plvi]r |
| SEQ. ID. NO. 367 | [rk]h[rk]xxx[rk]{2,4}xr |
| SEQ. ID. NO. 368 | [rk]k{2,4}x[rk][ql][rk][pl] |
| SEQ. ID. NO. 369 | [rk]r[ms]kxk[kr] |
| SEQ. ID. NO. 370 | [rk]x[rk]x[kr]x{4,6}rkk |
| SEQ. ID. NO. 371 | [rk]{2,4}x{1,2}[rk]x{0,2}[rk]x{3, |
| | 5}[rk]x{0,2}[rk][rk]{2,4}[pl] |
| SEQ. ID. NO. 372 | [rk]{2,4}x{2,4}[qlm][rk]x{2,3}[rk]kr |
| SEQ. ID. NO. 373 | [rk]{3,}?x[rk]x[rk]x{4,9}[rk]{3,}? |
| SEQ. ID. NO. 374 | [rk]{3,}?x{8,16}[rk]{4,}? |
| SEQ. ID. NO. 375 | [rk]{4,}?[qmnpl][rk]x{3,4}[rk]{2} |
| SEQ. ID. NO. 376 | [st]gx{1,3}g{3,}?x{1,2}g{3,}?[st] |
| SEQ. ID. NO. 377 | [stqm]rkrk[stqm] |
| SEQ. ID. NO. 378 | [stqm]rkrr[stqm] |
| SEQ. ID. NO. 379 | [stqm]rrrk[stqm] |
| SEQ. ID. NO. 380 | [ts][rk]kk[vli]r[pl] |
| SEQ. ID. NO. 381 | [yfw]rrrr[pl] |
| SEQ. ID. NO. 382 | apkrksgvskc |
| SEQ. ID. NO. 383 | aptkrkgs |
| SEQ. ID. NO. 384 | ckrkttnadrrka |
| SEQ. ID. NO. 385 | cygskntgakkrkidda |
| SEQ. ID. NO. 386 | d[kr]x{0,1}[ql][rk]{2,3}r |
| SEQ. ID. NO. 387 | dk[ql]kk[ql] |
| SEQ. ID. NO. 388 | dr[mn]kkkke |
| SEQ. ID. NO. 389 | eedgpqkkkrrl |
| SEQ. ID. NO. 390 | eylsrkgklel |
| SEQ. ID. NO. 391 | gggx{3}knrrx{6}rggrn |
| SEQ. ID. NO. 392 | gkkkyklkh |
| SEQ. ID. NO. 393 | gkkrska |
| SEQ. ID. NO. 394 | gr[rk]{2,4}xx[rk][ql] |
| SEQ. ID. NO. 395 | grkrkkrt |
| SEQ. ID. NO. 396 | g{2,4}[rk]x{1,3}g{3} |
| SEQ. ID. NO. 397 | hkkkkirtsptfttpktlrlrrqpkyprksaprrnkldhy |
| SEQ. ID. NO. 398 | hrieekrkrtyetfksi |
| SEQ. ID. NO. 399 | hrkyeaprhx{6}prkr |
| SEQ. ID. NO. 400 | ikyfkkfpkd |
| SEQ. ID. NO. 401 | k[ga]k[ag]kk[ag] |
| SEQ. ID. NO. 402 | k[ivqm]rr[vi][stk]l |
| SEQ. ID. NO. 403 | k[kr][kr]rr[kr] |
| SEQ. ID. NO. 404 | k[kr][qmn][rk]r[qmn]r |
| SEQ. ID. NO. 405 | k[mnq]rr[plvi]k[pl] |
| SEQ. ID. NO. 406 | k[pl]k{2,3}x{1,3}[rk]{2,4}x{6,9}k[kr] |
| SEQ. ID. NO. 407 | k[pl]k{3,}?xkk |
| SEQ. ID. NO. 408 | k[plmn]rrk[mnq] |
| SEQ. ID. NO. 409 | k[rk]{2,4}[st]h |
| SEQ. ID. NO. 410 | k[rk]{2,}?[ql]x{3,8}r{3} |
| SEQ. ID. NO. 411 | k[rk]{3,5}x{11,18}[rk]kx{2,3}k |
| SEQ. ID. NO. 412 | kakrqr |
| SEQ. ID. NO. 413 | kdcvinkhhrnrcqycrlqr |
| SEQ. ID. NO. 414 | khlkgr |
| SEQ. ID. NO. 415 | khrkhpg |
| SEQ. ID. NO. 416 | kk[mnqstc]r[mnqstc]k[mnqstc] |
| SEQ. ID. NO. 417 | kkekkkskk |

[0691] In one preferred embodiment, a small nuclear localization signal (such as RKRKK, SEQ. ID. NO. 338) is covalently attached to carbon 10 of paclitaxel molecule. In another preferred embodiment, the taxane molecule is attached to the NLS by a short linker which is composed of a ribonucleic acid/deoxyribineucleic acid hybrid linker which would be cleaved in the nucleus by Rnase H or other types of linkers sensitive to other enzymatic activity such that the taxane molecule is released from the NLS and allowed to bind to the tubulin molecules there in. Although not wanting to be bound to any particular theory, it appears that these systems exploit the fact that tubulin type beta II is found inside the nuclear membrane of cancer cells and not normal cells, thereby allowing NLS-guided tubulin binding drugs to find therapeutic target proteins only in cancer cells.

[0692] In the following compound, [chemical structure]
In the embodiment depicted above, when R₁ is OAc, the compound is paclitaxel. In one embodiment, a nuclear localization signal is linked to C10 wherein R₁ is O[NLS]. In another such embodiment, the nuclear localization signal is RKRKK (SEQ. ID. NO. 338), wherein R₁ is ORKRKK.

[0693] As described above, in yet another embodiment, there is employed a linker molecule, wherein R₁ is O[linker][NLS]. In another embodiment the linker is nucleic acid, and the NLS is selected from the list presented above. Similar functional groups may be installed at other carbon positions around the taxane ring. For example, an NLS functional group may be installed at C4, C7, C9, and/or C10. In another embodiment, a plurality of NLS functional groups are present in a single taxane molecule. Yet other variations upon this theme will be apparent to those skilled in the art.

[0694] Although preferred embodiments have been depicted and described in detail herein, it will be apparent to those skilled in the relevant art that various modifications, additons, substitutions, and the like can be made without departing from the spirit of the invention, and these are thus considered to be within the scope of the invnetion as defined in the claims which follow.

1. A composition of matter comprised of a substrate comprised of a biologically active substrate and a magnetic moiety wherein:
a. said biologically active substrate is an anti-microtubule agent, and
b. said magnetic moiety is covalently bound to said biologically active substrate.

2. The composition of matter as recited in claim 1, wherein said substrate has a mitotic index factor of at least about 20 percent.

3. The composition of matter as recited in claim 2, wherein said substrate has a mitotic index factor of at least about 30 percent.

4. The composition of matter as recited in claim 3, wherein said substrate has a mitotic index factor of at least about 50 percent.

5. The composition of matter as recited in claim 1, wherein said magnetic moiety is paramagnetic.

6. The composition of matter as recited in claim 5, wherein said magnetic moiety is comprised of a nitroxide.

7. The composition of matter as recited in claim 1, wherein said magnetic moiety is comprised of a metallic atom.

8. The composition of matter as recited in claim 7, wherein said magnetic moiety is ferromagnetic.

9. The composition of matter as recited in claim 7, wherein said metallic atom has a positive magnetic susceptibility of at least 2×10⁻⁴ cgs.

10. The composition of matter as recited in claim 9, wherein said metallic atom is selected from the group consisting of cerium, cobalt, dysprosium, europium, gadolinium, manganese, palladium, plutonium, praseodymium, samarium, technetium, and thulium.

11. The composition of matter as recited in claim 7, wherein said metallic atom is selected from the group consisting of cerium, cobalt, dysprosium, europium, gadolinium, manganese, palladium, plutonium, praseodymium, samarium, technetium, thulium, iron, and gallium.

12. The composition of matter as recited in claim 11, wherein said metallic atom is a radioactive isotope.

13. The composition of matter as recited in claim 12, wherein said metallic atom is selected from the group consisting of cerium, cobalt-53, cobalt-54, cobalt-55, cobalt-56, cobalt-57, cobalt-58, cobalt-59, cobalt-60, cobalt-61, cobalt-62, cobalt-63, gadolinium-146, manganese-50, iron-49, iron-51, iron-52, iron-53, iron-54, iron-57, iron-58, iron-59, iron-60, iron-61, and iron-62.

14. The composition of matter as recited in claim 9, wherein said substrate has a water solubility of at least about 10 microgram per milliliter.

15. The composition of matter as recited in claim 14, wherein said substrate has a water solubility of at least about 100 microgram per milliliter.

16. The composition of matter as recited in claim 15, wherein said substrate has a water solubility of at least about 500 microgram per milliliter.

17. The composition of matter as recited in claim 16, wherein said substrate has a water solubility of at least about 1000 microgram per milliliter.

18. The composition of matter as recited in claim 8, wherein said metallic atom is iron.

19. The composition of matter as recited in claim 18, wherein said iron is iron (III).

20. The composition of matter as recited in claim 8, wherein said metallic atom is gallium.

21. The composition of matter as recited in claim 19, wherein said magnetic moiety is further comprised of at least seven carbon atoms.

22. The composition of matter as recited in claim 9, wherein said substrate has a positive magnetic susceptibility of at least 1×10⁻³ cgs.

23. The composition of matter as recited in claim 8, wherein said biologically active substrate is a taxane.

24. The composition of matter as recited in claim 23, wherein said taxane is a paclitaxel.

25. The composition of matter as recited in claim 24, wherein said paclitaxel is a 10-desacetyl paclitaxel.

26. The composition of matter as recited in claim 23, wherein said taxane is a docetaxel.

27. The composition of matter as recited in claim 23, wherein said magnetic moiety is a siderophore.

28. The composition of matter as recited in claim 27, wherein said siderophore is a catecholate.

29. The composition of matter as recited in claim 28, wherein said catecholate is an albomycin.

30. The composition of matter as recited in claim 28, wherein said catecholate is an agrobactin.

31. The composition of matter as recited In claim 28, wherein said catecholate is a enterobactin.

32. The composition of matter as recited in claim 27, wherein said siderophore is a hydroxamic acid.

33. The composition of matter as recited in claim 32, wherein said hydroxamic acid is a ferrichrome.

34. The composition of matter as recited in claim 32, wherein said hydroxamic acid is a ferricrocin.

35. The composition of matter as recited in claim 32, wherein said hydroxamic acid is an albomycin.

36. The composition of matter as recited in claim 32, wherein said hydroxamic acid is a ferrioxamine.

37. The composition of matter as recited in claim 32, wherein said hydroxamic acid is a rhodotorulic acid.

38. The composition of matter as recited in claim 32, wherein said hydroxamic acid is of the formula —(CH₂)ₘ—N(OH)—C(O)—(CH₂)ₙ—(CH═CH)ₒ—CH₃ wherein:
a. m is an integer from 2 to 6,
b. n is selected from the group consisting of zero and a number from 1 to 22,
c. o is selected from the group consisting of zero and a number from 1 to 4, and
d. sum of m and o is no greater than 25.

39. The composition of matter as recited in claim 10, wherein said substrate is further comprised of a linker, wherein said linker is covalently bound to said magnetic moiety and said linker is covalently bound to said biologically active substrate.

40. The composition of matter as recited in claim 39, wherein said biologically active substrate is a taxane.

41. The composition of matter as recited in claim 40, wherein said linker is covalently bound to said biologically active substrate at a C-4 position of said taxane.

42. The composition of matter as recited in claim 40, wherein said linker is covalently bound to said biologically active substrate at a C-7 position of said taxane.

43. The composition of matter as recited in claim 40, wherein said linker is covalently bound to said biologically active substrate at a C-9 position of said taxane.

44. The composition of matter as recited in claim 40, wherein said linker is covalently bound to said biologically active substrate at a C-10 position of said taxane.

45. The composition of matter as recited in claim 40, wherein said linker is covalently bound to said biologically active substrate at a C-7 position and a C-9 position of said taxane.

46. The composition of matter as recited in claim 45, wherein said linker is comprised of an acetal.

47. The composition of matter as recited in claim 45, wherein said linker is comprised of a ketal.

48. A process for treating a disease comprising the steps of
a. administering a first substrate wherein
i. said first substrate is comprised of a first biologically active substrate and a first magnetic moiety wherein:
ii. said first biologically active substrate is an anti-mitotic agent, and
iii. said first magnetic moiety is covalently bound to said first biologically active substrate,
b. administering a second substrate wherein
i. said second substrate is comprised of a second biologically active substrate and a second magnetic moiety wherein:
ii. said second biologically active substrate is an anti-mitotic agent, and
iii. said second magnetic moiety is covalently bound to said second biologically active substrate,
c. wherein said first biologically active substrate and said second biologically active substrate are not the same substrate.

49. The process as recited in claim 48, wherein said first biologically active substrate is a taxane.

50. The process as recited in claim 49, wherein said first biologically active substrate has a mitotic index factor of at least about 10 percent.

51. The process as recited in claim 50, wherein said first biologically active substrate has a mitotic index factor of at least about 20 percent.

52. The process as recited in claim 51, wherein said first biologically active substrate has a mitotic index factor of at least about 50 percent.

53. The process as recited in claim 52, wherein said second biologically active substrate has a mitotic index factor of at least about 10 percent.

54. The process as recited in claim 53, wherein said second biologically active substrate has a mitotic index factor of at least about 20 percent.

55. The process as recited in claim 54, wherein said second biologically active substrate has a mitotic index factor of at least about 50 percent.

56. The process as recited in claim 55, wherein said first biologically active substrate has a molecular weight of at least 400 grams per mole.

57. The process as recited in claim 56, wherein said first biologically active substrate has a molecular weight of at least 500 grams per mole.

58. The process as recited in claim 57, wherein said first biologically active substrate has a molecular weight of at least 1000 grams per mole.

59. The process as recited in claim 58, wherein said first magnetic moiety has a positive magnetic susceptibility of at least 1×10⁻³ cgs.

60. The process as recited in claim 59, wherein said first magnetic moiety has a positive magnetic susceptibility of at least 5×10⁻³ cgs.

61. The process as recited in claim 60, wherein said first magnetic moiety has a positive magnetic susceptibility of at least 1×10⁻² cgs.

62. The process as recited in claim 60, wherein said taxane is comprised of an oxetane ring.

63. A composition of matter comprised of a substrate comprised of a biologically active substrate and a magnetic moiety wherein said magnetic moiety is covalently bound to said biologically active substrate,
a. said magnetic moiety is comprised of a metallic atom,
b. said metallic atom has a positive magnetic susceptibility of at least 2×10⁻⁴ cgs.

64. The composition of matter as recited in claim 63, wherein said biologically active substrate is a lectin.

65. The composition of matter as recited in claim 63, wherein said biologically active substrate is an anti-cancer agent.

66. The composition of matter as recited in claim 54, wherein said biologically active substrate is an anti-microtubule agent.

67. A process for treating a disease comprising the steps of
a. administering a substrate to a patient wherein
i. said substrate is comprised of a biologically active substrate and a magnetic moiety wherein:
1. said biologically active substrate is an anti-microtubule agent, and
2. said magnetic moiety is covalently bound to said biologically active substrate, and
ii. said patient is comprised of a targeted tissue,
b. applying a magnetic field to said patient such that said magnetic field is focused upon said targeted tissue, and
c. said magnetic field acts upon said magnetic moiety and increases the concentration of said substrate at said targeted issue.

68. The process for treating a disease as recited in claim 67, wherein said magnetic field has a strength of at least about 6 Tesla.

69. The process for treating a disease as recited in claim 67, wherein said step of applying said magnetic field has a duration of at least about 30 minutes.

70. The process for treating a disease as recited in claim 69, wherein said step of applying said magnetic field is accomplished by a magnetic field generator, wherein said magnetic field generator is disposed within said patient.

71. The process for treating a disease as recited in claim 70, wherein said magnetic field generator is disposed substantially proximal to said targeted tissue.

72. The process for treating a disease as recited in claim 71, wherein said magnetic field generator is in telemetric communication with a controller, wherein said controller is disposed external to said patient.

73. The process for treating a disease as recited in claim 67, wherein said substrate is disposed within a drug delivery housing, wherein said drug delivery housing is disposed within said patient.

74. The process for treating a disease as recited in claim 73, wherein said drug delivery housing is operatively configured to release said substrate in response to ultrasonic energy from external to said patient.

75. The process for treating a disease as recited in claim 73, wherein said drug delivery housing is operatively configured to release said substrate in response to radio frequency energy from external to said patient.

76. The process for treating a disease as recited in claim 73, wherein said drug delivery housing is operatively configured to release said substrate in response to magnetic energy from external to said patient.

77. The process for treating a disease as recited in claim 73, wherein said drug delivery housing is a polymeric carrier.

78. The process for treating a disease as recited in claim 77, wherein said polymeric carrier is a drug eluting polymer.

79. The process for treating a disease as recited in claim 78, wherein said drug eluting polymer is silicon rubber.

80. The process for treating a disease as recited in claim 73, wherein said drug delivery housing is a pump.

81. The process for treating a disease as recited in claim 67, said step of administering said substrate to said patient is accomplished by an intravenous injection.

82. The process for treating a disease as recited in claim 67, said step of administering said substrate to said patient is accomplished by an intravenous drip over a period of at least 30 minutes.

83. The process for treating a disease as recited in claim 67, said step of administering said substrate to said patient is accomplished by a drug eluting stent.

The application's sequence listing, which the Patent Office published only in electronic form, follows.

SEQUENCE LISTING (418 sequences)

SEQ ID NO: 1 - protein, 3494 aa, Anemia phyllitidis
MMMMMMMMRRRRRRRRRRREEEEEEEEECCCCCCIIIIIIIISSSSSSIIIIIIIIHHHHHHHHHHIIIIIIIIGGGGQQQQQQQQQAAAAAGGGGIIIIIIIIQQQQQQQQQVVVVVVVGGGGNNNNNNNNAAAAARRRRRRRRRRRWWWWWWWWWWWWWWEEEEEEEEELLLLLLLLYYYYYYYYYYYYCCCCCCLLLLLLLLEEEEEEEEEHHHHHHHHHHGGGGIIIIIIIIQQQQQQQQQPPPPPPPDDDDDDDDGGGGQQQQQQQQQMMMMMMMMPPPPPPPSSSSSSDDDDDDDDKKKKKKKKKTTTTTTTVVVVVVVGGGGGGGGGGGGDDDDDDDDDDDDDDDDAAAAAFFFFFFFFFFFNNNNNNNNTTTTTTTFFFFFFFFFFFFFFFFFFFFFFSSSSSSEEEEEEEEETTTTTTTGGGGAAAAAGGGGKKKKKKKKKHHHHHHHHHHVVVVVVVPPPPPPPRRRRRRRRRRRAAAAAVVVVVVVFFFFFFFFFFFLLLLLLLLDDDDDDDDLLLLLLLLEEEEEEEEEPPPPPPPTTTTTTTVVVVVVVIIIIIIIIDDDDDDDDEEEEEEEEEVVVVVVVRRRRRRRRRRRTTTTTTTGGGGTTTTTTTYYYYYYYYYYYYRRRRRRRRRRRQQQQQQQQQLLLLLLLLFFFFFFFFFFFHHHHHHHHHHPPPPPPPEEEEEEEEEQQQQQQQQQLLLLLLLLIIIIIIIISSSSSSGGGGKKKKKKKKKEEEEEEEEEDDDDDDDDAAAAAAAAAANNNNNNNNNNNNNNNNFFFFFFFFFFFAAAAARRRRRRRRRRRGGGGHHHHHHHHHHYYYYYYYYYYYYTTTTTTTIIIIIIIIGGGGKKKKKKKKKEEEEEEEEEIIIIIIIIVVVVVVVDDDDDDDDLLLLLLLLCCCCCCLLLLLLLLDDDDDDDDRRRRRRRRRRRIIIIIIIIRRRRRRRRRRRKKKKKKKKKLLLLLLLLAAAAADDDDDDDDNNNNNNNNCCCCCCTTTTTTTGGGGLLLLLLLLQQQQQQQQQGGGGFFFFFFFFFFFLLLLLLLLVVVVVVVFFFFFFFFFFFHHHHHHHHHHAAAAAVVVVVVVGGGGGGGGGGGGTTTTTTTGGGGSSSSSSGGGGLLLLLLLLGGGGSSSSSSLLLLLLLLLLLLLLLLLLLLLLLLEEEEEEEEERRRRRRRRRRRLLLLLLLLSSSSSSVVVVVVVDDDDDDDDYYYYYYYYYYYYGGGGKKKKKKKKKKKKKKKKKKSSSSSSKKKKKKKKKLLLLLLLLGGGGFFFFFFFFFFFTTTTTTTVVVVVVVYYYYYYYYYYYYPPPPPPPSSSSSSPPPPPPPQQQQQQQQQVVVVVVVSSSSSSTTTTTTTSSSSSSVVVVVVVVVVVVVVEEEEEEEEEPPPPPPPYYYYYYYYYYYYNNNNNNNNSSSSSSVVVVVVVLLLLLLLLSSSSSSTTTTTTTHHHHHHHHHHSSSSSSLLLLLLLLLLLLLLLLEEEEEEEEEHHHHHHHHHHTTTTTTTDDDDDDDDVVVVVVVSSSSSSVVVVVVVLLLLLLLLLLLLLLLLDDDDDDDDNNNNNNNNEEEEEEEEEAAAAAIIIIIIIIYYYYYYYYYYYYDDDDDDDDIIIIIIIICCCCCCRRRRRRRRRRRRRRRRRRRRRRSSSSSSLLLLLLLLDDDDDDDDIIIIIIIIEEEEEEEEERRRRRRRRRRRPPPPPPPTTTTTTTYYYYYYYYYYYYTTTTTTTNNNNNNNNLLLLLLLLNNNNNNNNRRRRRRRRRRRLLLLLLLLVVVVVVVSSSSSSQQQQQQQQQVVVVVVVIIIIIIIISSSSSSSSSSSSLLLLLLLLTTTTTTTAAAAASSSSSSLLLLLLLLRRRRRRRRRRRFFFFFFFFFFFDDDDDDDDGGGGAAAAALLLLLLLLNNNNNNNNVVVVVVVDDDDDDDDVVVVVVVTTTTTTTEEEEEEEEEFFFFFFFFFFFQQQQQQQQQTTTTTTTNNNNNNNNLLLLLLLLVVVVVVVPPPPPPPYYYYYYYYYYYYPPPPPPPRRRRRRRRRRRIIIIIIIIHHHHHHHHHHFFFFFFFFFFFMMMMMMMMLLLLLLLLSSSSSSSSSSSSYYYYYYYYYYYYAAAAAPPPPPPPVVVVVVVIIIIIIIISSSSSSAAAAAEEEEEEEEEKKKKKKKKKAAAAAYYYYYYYYYYYYHHHHHHHHHHEEEEEEEEEQQQQQQQQQLLLLLLLLSSSSSSVVVVVVVAAAAAEEEEEEEEEIIIIIIIITTTTTTTNNNNNNNNSSSSSSAAAAAFFFFFFFFFFFEEEEEEEEEPPPPPPPAAAAASSSSSSMMMMMMMMMMMMMMMMAAAAAKKKKKKKKKCCCCCCDDDDDDDDPPPPPPPRRRRRRRRRRRHHHHHHHHHHGGGGKKKKKKKKKYYYYYYYYYYYYMMMMMMMMAAAAACCCCCCCCCCCCLLLLLLLLMMMMMMMMYYYYYYYYYYYYRRRRRRRRRRRGGGGDDDDDDDDVVVVVVVVVVVVVVPPPPPPPKKKKKKKKKDDDDDDDDVVVVVVVNNNNNNNNAAAAAAAAAAVVVVVVVAAAAATTTTTTTIIIIIIIIKKKKKKKKKTTTTTTTKKKKKKKKKRRRRRRRRRRRTTTTTTTIIIIIIIIQQQQQQQQQFFFFFFFFFFFVVVVVVVDDDDDDDDWWWWWWWWWWWWWWCCCCCCPPPPPPPTTTTTTTGGGGFFFFFFFFFFFKKKKKKKKKCCCCCCGGGGIIIIIIIINNNNNNNNYYYYYYYYYYYYQQQQQQQQQPPPPPPPPPPPPPPTTTTTTTVVVVVVVVVVVVVVPPPPPPPGGGGGGGGDDDDDDDDLLLLLLLLAAAAAKKKKKKKKKVVVVVVVQQQQQQQQQRRRRRRRRRRRAAAAAVVVVVVVCCCCCCMMMMMMMMIIIIIIIISSSSSSNNNNNNNNSSSSSSTTTTTTTSSSSSSVVVVVVVAAAAAEEEEEEEEEVVVVVVVFFFFFFFFFFFSSSSSSRRRRRRRRRRRIIIIIIIIDDDDDDDDHHHHHHHHHHKKKKKKKKKFFFFFFFFFFFDDDDDDDDLLLLLLLLMMMMMMMMYYYYYYYYYYYYAAAAAKKKKKKKKKRRRRRRRRRRRAAAAAFFFFFFFFFFFVVVVVVVHHHHHHHHHHWWWWWWWWWWWWWWYYYYYYYYYYYYVVVVVVVGGGGEEEEEEEEEGGGGMMMMMMMMEEEEEEEEEEEEEEEEEEGGGGEEEEEEEEEFFFFFFFFFFFSSSSSSEEEEEEEEEAAAAARRRRRRRRRRREEEEEEEEEDDDDDDDDLLLLLLLLAAAAAAAAAALLLLLLLLEEEEEEEEEKKKKKKKKKDDDDDDDDYYYYYYYYYYYYEEEEEEEEEEEEEEEEEEVVVVVVVGGGGAAAAAEEEEEEEEESSSSSSGGGGEEEEEEEEEGGGGEEEEEEEEEEEEEEEEEEGGGGDDDDDDDDEEEEEEEEEGGGGEEEEEEEEEEEEEEEEEEYYYYYYYYYYYYY

SEQ ID NO: 2 - protein, 3498 aa, Arabidopsis thaliana
MMMMMMMMRRRRRRRRRRREEEEEEEEEIIIIIIIIIIIIIIIISSSSSSIIIIIIIIHHHHHHHHHHIIIIIIIIGGGGQQQQQQQQQAAAAAGGGGIIIIIIIIQQQQQQQQQVVVVVVVGGGGNNNNNNNNSSSSSSCCCCCCWWWWWWWWWWWWWWEEEEEEEEELLLLLLLLYYYYYYYYYYYYCCCCCCLLLLLLLLEEEEEEEEEHHHHHHHHHHGGGGIIIIIIIIQQQQQQQQQPPPPPPPDDDDDDDDGGGGTTTTTTTMMMMMMMMPPPPPPPSSSSSSDDDDDDDDSSSSSSTTTTTTTVVVVVVVGGGGAAAAACCCCCCHHHHHHHHHHDDDDDDDDAAAAAFFFFFFFFFFFNNNNNNNNTTTTTTTFFFFFFFFFFFFFFFFFFFFFFSSSSSSEEEEEEEEETTTTTTTSSSSSSSSSSSSGGGGQQQQQQQQQHHHHHHHHHHVVVVVVVPPPPPPPRRRRRRRRRRRAAAAAVVVVVVVFFFFFFFFFFFLLLLLLLLDDDDDDDDLLLLLLLLEEEEEEEEEPPPPPPPTTTTTTTVVVVVVVIIIIIIIIDDDDDDDDEEEEEEEEEVVVVVVVRRRRRRRRRRRTTTTTTTGGGGTTTTTTTYYYYYYYYYYYYRRRRRRRRRRRQQQQQQQQQLLLLLLLLFFFFFFFFFFFHHHHHHHHHHPPPPPPPEEEEEEEEEQQQQQQQQQLLLLLLLLIIIIIIIISSSSSSGGGGKKKKKKKKKEEEEEEEEEDDDDDDDDAAAAAAAAAANNNNNNNNNNNNNNNNFFFFFFFFFFFAAAAARRRRRRRRRRRGGGGHHHHHHHHHHYYYYYYYYYYYYTTTTTTTVVVVVVVGGGGRRRRRRRRRRREEEEEEEEEIIIIIIIIVVVVVVVDDDDDDDDTTTTTTTCCCCCCLLLLLLLLEEEEEEEEERRRRRRRRRRRLLLLLLLLRRRRRRRRRRRKKKKKKKKKLLLLLLLLAAAAADDDDDDDDNNNNNNNNCCCCCCTTTTTTTGGGGLLLLLLLLQQQQQQQQQGGGGFFFFFFFFFFFLLLLLLLLVVVVVVVFFFFFFFFFFFNNNNNNNNAAAAAVVVVVVVGGGGGGGGGGGGTTTTTTTGGGGSSSSSSGGGGLLLLLLLLGGGGSSSSSSLLLLLLLLLLLLLLLLLLLLLLLLEEEEEEEEERRRRRRRRRRRLLLLLLLLSSSSSSVVVVVVVDDDDDDDDFFFFFFFFFFFGGGGKKKKKKKKKKKKKKKKKKSSSSSSKKKKKKKKKLLLLLLLLGGGGFFFFFFFFFFFTTTTTTTIIIIIIIIYYYYYYYYYYYYPPPPPPPSSSSSSPPPPPPPQQQQQQQQQVVVVVVVSSSSSSTTTTTTTAAAAAVVVVVVVVVVVVVVEEEEEEEEEPPPPPPPYYYYYYYYYYYYNNNNNNNNSSSSSSVVVVVVVLLLLLLLLSSSSSSTTTTTTTHHHHHHHHHHSSSSSSLLLLLLLLLLLLLLLLEEEEEEEEEHHHHHHHHHHTTTTTTTDDDDDDDDVVVVVVVVVVVVVVVVVVVVVLLLLLLLLLLLLLLLLDDDDDDDDNNNNNNNNEEEEEEEEEAAAAAIIIIIIIIYYYYYYYYYYYYDDDDDDDDIIIIIIIICCCCCCRRRRRRRRRRRRRRRRRRRRRRSSSSSSLLLLLLLLDDDDDDDDIIIIIIIIEEEEEEEEERRRRRRRRRRRPPPPPPPTTTTTTTYYYYYYYYYYYYSSSSSSNNNNNNNNLLLLLLLLNNNNNNNNRRRRRRRRRRRLLLLLLLLIIIIIIIISSSSSSQQQQQQQQQTTTTTTTIIIIIIIISSSSSSSSSSSSLLLLLLLLTTTTTTTTTTTTTTSSSSSSLLLLLLLLRRRRRRRRRRRFFFFFFFFFFFDDDDDDDDGGGGAAAAAIIIIIIIINNNNNNNNVVVVVVVDDDDDDDDIIIIIIIITTTTTTTEEEEEEEEEFFFFFFFFFFFQQQQQQQQQTTTTTTTNNNNNNNNLLLLLLLLVVVVVVVPPPPPPPYYYYYYYYYYYYPPPPPPPRRRRRRRRRRRIIIIIIIIHHHHHHHHHHFFFFFFFFFFFMMMMMMMMLLLLLLLLSSSSSSSSSSSSYYYYYYYYYYYYAAAAAPPPPPPPVVVVVVVIIIIIIIISSSSSSSSSSSSAAAAAKKKKKKKKKAAAAAYYYYYYYYYYYYHHHHHHHHHHEEEEEEEEEQQQQQQQQQFFFFFFFFFFFSSSSSSVVVVVVVPPPPPPPEEEEEEEEEIIIIIIIITTTTTTTTTTTTTTSSSSSSVVVVVVVFFFFFFFFFFFEEEEEEEEEPPPPPPPSSSSSSNNNNNNNNMMMMMMMMMMMMMMMMAAAAAKKKKKKKKKCCCCCCDDDDDDDDPPPPPPPRRRRRRRRRRRHHHHHHHHHHGGGGKKKKKKKKKYYYYYYYYYYYYMMMMMMMMAAAAACCCCCCCCCCCCLLLLLLLLMMMMMMMMYYYYYYYYYYYYRRRRRRRRRRRGGGGDDDDDDDDVVVVVVVVVVVVVVPPPPPPPKKKKKKKKKDDDDDDDDVVVVVVVNNNNNNNNTTTTTTTAAAAAVVVVVVVAAAAAAAAAAIIIIIIIIKKKKKKKKKAAAAAKKKKKKKKKRRRRRRRRRRRTTTTTTTIIIIIIIIQQQQQQQQQFFFFFFFFFFFVVVVVVVDDDDDDDDWWWWWWWWWWWWWWCCCCCCPPPPPPPTTTTTTTGGGGFFFFFFFFFFFKKKKKKKKKCCCCCCGGGGIIIIIIIINNNNNNNNYYYYYYYYYYYYQQQQQQQQQPPPPPPPPPPPPPPSSSSSSVVVVVVVVVVVVVVPPPPPPPGGGGGGGGDDDDDDDDLLLLLLLLAAAAAKKKKKKKKKVVVVVVVQQQQQQQQQRRRRRRRRRRRAAAAAVVVVVVVCCCCCCMMMMMMMMIIIIIIIISSSSSSNNNNNNNNNNNNNNNNTTTTTTTAAAAAVVVVVVVAAAAAEEEEEEEEEVVVVVVVFFFFFFFFFFFSSSSSSRRRRRRRRRRRIIIIIIIIDDDDDDDDHHHHHHHHHHKKKKKKKKKFFFFFFFFFFFDDDDDDDDLLLLLLLLMMMMMMMMYYYYYYYYYYYYSSSSSSKKKKKKKKKRRRRRRRRRRRAAAAAFFFFFFFFFFFVVVVVVVHHHHHHHHHHWWWWWWWWWWWWWWYYYYYYYYYYYYVVVVVVVGGGGEEEEEEEEEGGGGMMMMMMMMEEEEEEEEEEEEEEEEEEGGGGEEEEEEEEEFFFFFFFFFFFSSSSSSEEEEEEEEEAAAAARRRRRRRRRRREEEEEEEEEDDDDDDDDLLLLLLLLAAAAAAAAAALLLLLLLLEEEEEEEEEKKKKKKKKKDDDDDDDDYYYYYYYYYYYYEEEEEEEEEEEEEEEEEEVVVVVVVGGGGGGGGEEEEEEEEEGGGGAAAAAEEEEEEEEEDDDDDDDDDDDDDDDDDDDDDDDDEEEEEEEEEEEEEEEEEEGGGGDDDDDDDDEEEEEEEEEYYYYYYYYYYYYY

SEQ ID NO: 3 - protein, 3230 aa, Gallus gallus
EEEEEEEEETTTTTTTIIIIIIIIGGGGGGGGGGGGDDDDDDDDDDDDDDDDSSSSSSFFFFFFFFFFFNNNNNNNNTTTTTTTFFFFFFFFFFFFFFFFFFFFFFSSSSSSEEEEEEEEETTTTTTTGGGGAAAAAGGGGKKKKKKKKKHHHHHHHHHHVVVVVVVPPPPPPPRRRRRRRRRRRAAAAAVVVVVVVFFFFFFFFFFFVVVVVVVDDDDDDDDLLLLLLLLEEEEEEEEEPPPPPPPTTTTTTTVVVVVVVIIIIIIIIDDDDDDDDEEEEEEEEEVVVVVVVRRRRRRRRRRRTTTTTTTGGGGTTTTTTTYYYYYYYYYYYYRRRRRRRRRRRQQQQQQQQQLLLLLLLLFFFFFFFFFFFHHHHHHHHHHPPPPPPPEEEEEEEEEQQQQQQQQQLLLLLLLLIIIIIIIITTTTTTTGGGGKKKKKKKKKEEEEEEEEEDDDDDDDDAAAAAAAAAANNNNNNNNNNNNNNNNYYYYYYYYYYYYAAAAARRRRRRRRRRRGGGGHHHHHHHHHHYYYYYYYYYYYYTTTTTTTIIIIIIIIGGGGKKKKKKKKKEEEEEEEEEIIIIIIIIIIIIIIIIDDDDDDDDLLLLLLLLVVVVVVVLLLLLLLLDDDDDDDDRRRRRRRRRRRIIIIIIIIRRRRRRRRRRRKKKKKKKKKLLLLLLLLAAAAADDDDDDDDQQQQQQQQQCCCCCCTTTTTTTGGGGLLLLLLLLQQQQQQQQQGGGGFFFFFFFFFFFSSSSSSVVVVVVVFFFFFFFFFFFHHHHHHHHHHSSSSSSFFFFFFFFFFFGGGGGGGGGGGGTTTTTTTGGGGSSSSSSGGGGFFFFFFFFFFFTTTTTTTSSSSSSLLLLLLLLLLLLLLLLMMMMMMMMEEEEEEEEERRRRRRRRRRRLLLLLLLLSSSSSSVVVVVVVDDDDDDDDYYYYYYYYYYYYGGGGKKKKKKKKKKKKKKKKKKSSSSSSKKKKKKKKKLLLLLLLLEEEEEEEEEFFFFFFFFFFFSSSSSSIIIIIIIIYYYYYYYYYYYYPPPPPPPAAAAARRRRRRRRRRRQQQQQQQQQVVVVVVVSSSSSSTTTTTTTAAAAAVVVVVVVVVVVVVVEEEEEEEEEPPPPPPPYYYYYYYYYYYYNNNNNNNNSSSSSSIIIIIIIILLLLLLLLTTTTTTTTTTTTTTHHHHHHHHHHTTTTTTTTTTTTTTLLLLLLLLEEEEEEEEEHHHHHHHHHHSSSSSSDDDDDDDDCCCCCCAAAAAFFFFFFFFFFFMMMMMMMMVVVVVVVDDDDDDDDNNNNNNNNEEEEEEEEEAAAAAIIIIIIIIYYYYYYYYYYYYDDDDDDDDIIIIIIIICCCCCCRRRRRRRRRRRRRRRRRRRRRRNNNNNNNNLLLLLLLLDDDDDDDDIIIIIIIIEEEEEEEEERRRRRRRRRRRPPPPPPPTTTTTTTYYYYYYYYYYYYTTTTTTTNNNNNNNNLLLLLLLLNNNNNNNNRRRRRRRRRRRLLLLLLLLIIIIIIIIGGGGQQQQQQQQQIIIIIIIIVVVVVVVSSSSSSSSSSSSIIIIIIIITTTTTTTAAAAASSSSSSLLLLLLLLRRRRRRRRRRRFFFFFFFFFFFDDDDDDDDGGGGAAAAALLLLLLLLNNNNNNNNVVVVVVVDDDDDDDDLLLLLLLLTTTTTTTEEEEEEEEEFFFFFFFFFFFQQQQQQQQQTTTTTTTNNNNNNNNLLLLLLLLVVVVVVVPPPPPPPYYYYYYYYYYYYPPPPPPPRRRRRRRRRRRIIIIIIIIHHHHHHHHHHFFFFFFFFFFFPPPPPPPLLLLLLLLAAAAATTTTTTTYYYYYYYYYYYYAAAAAPPPPPPPVVVVVVVIIIIIIIISSSSSSAAAAAEEEEEEEEEKKKKKKKKKAAAAAYYYYYYYYYYYYHHHHHHHHHHEEEEEEEEEQQQQQQQQQLLLLLLLLSSSSSSVVVVVVVAAAAAEEEEEEEEEIIIIIIIITTTTTTTNNNNNNNNAAAAACCCCCCFFFFFFFFFFFEEEEEEEEEPPPPPPPAAAAANNNNNNNNQQQQQQQQQMMMMMMMMVVVVVVVKKKKKKKKKCCCCCCDDDDDDDDPPPPPPPRRRRRRRRRRRHHHHHHHHHHGGGGKKKKKKKKKYYYYYYYYYYYYMMMMMMMMAAAAACCCCCCCCCCCCLLLLLLLLLLLLLLLLYYYYYYYYYYYYRRRRRRRRRRRGGGGDDDDDDDDVVVVVVVVVVVVVVPPPPPPPKKKKKKKKKDDDDDDDDVVVVVVVNNNNNNNNAAAAAAAAAAIIIIIIIIAAAAATTTTTTTIIIIIIIIKKKKKKKKKTTTTTTTKKKKKKKKKRRRRRRRRRRRTTTTTTTIIIIIIIIQQQQQQQQQFFFFFFFFFFFVVVVVVVDDDDDDDDWWWWWWWWWWWWWWCCCCCCPPPPPPPTTTTTTTGGGGFFFFFFFFFFFKKKKKKKKKVVVVVVVGGGGIIIIIIIINNNNNNNNYYYYYYYYYYYYQQQQQQQQQPPPPPPPPPPPPPPTTTTTTTVVVVVVVVVVVVVVPPPPPPPGGGGGGGGDDDDDDDDLLLLLLLLAAAAAKKKKKKKKKVVVVVVVQQQQQQQQQRRRRRRRRRRRAAAAAVVVVVVVCCCCCCMMMMMMMMLLLLLLLLSSSSSSNNNNNNNNTTTTTTTTTTTTTTAAAAAIIIIIIIIAAAAAEEEEEEEEEAAAAAWWWWWWWWWWWWWWAAAAARRRRRRRRRRRLLLLLLLLDDDDDDDDHHHHHHHHHHKKKKKKKKKFFFFFFFFFFFDDDDDDDDLLLLLLLLMMMMMMMMYYYYYYYYYYYYAAAAAKKKKKKKKKRRRRRRRRRRRAAAAAFFFFFFFFFFFVVVVVVVHHHHHHHHHHWWWWWWWWWWWWWWYYYYYYYYYYYYVVVVVVVGGGGEEEEEEEEEGGGGMMMMMMMMEEEEEEEEEEEEEEEEEEGGGGEEEEEEEEEFFFFFFFFFFFSSSSSSEEEEEEEEEAAAAARRRRRRRRRRREEEEEEEEEDDDDDDDDMMMMMMMMAAAAAAAAAALLLLLLLLEEEEEEEEEKKKKKKKKKDDDDDDDDYYYYYYYYYYYYEEEEEEEEEEEEEEEEEEVVVVVVVGGGGVVVVVVVDDDDDDDDSSSSSSVVVVVVVEEEEEEEEEGGGGEEEEEEEEEGGGGEEEEEEEEEEEEEEEEEEEEEEEEEEEGGGGEEEEEEEEEEEEEEEEEEYYYYYYYYYYYYY

SEQ ID NO: 4 - protein, 3483 aa, Chlamydomonas reinhardtii
MMMMMMMMRRRRRRRRRRREEEEEEEEEVVVVVVVIIIIIIIISSSSSSIIIIIIIIHHHHHHHHHHIIIIIIIIGGGGQQQQQQQQQAAAAAGGGGIIIIIIIIQQQQQQQQQVVVVVVVGGGGNNNNNNNNAAAAACCCCCCWWWWWWWWWWWWWWEEEEEEEEELLLLLLLLYYYYYYYYYYYYCCCCCCLLLLLLLLEEEEEEEEEHHHHHHHHHHGGGGIIIIIIIIQQQQQQQQQPPPPPPPDDDDDDDDGGGGQQQQQQQQQMMMMMMMMPPPPPPPSSSSSSDDDDDDDDKKKKKKKKKTTTTTTTIIIIIIIIGGGGGGGGGGGGDDDDDDDDDDDDDDDDAAAAAFFFFFFFFFFFNNNNNNNNTTTTTTTFFFFFFFFFFFFFFFFFFFFFFSSSSSSEEEEEEEEETTTTTTTGGGGAAAAAGGGGKKKKKKKKKHHHHHHHHHHVVVVVVVPPPPPPPRRRRRRRRRRRCCCCCCIIIIIIIIFFFFFFFFFFFLLLLLLLLDDDDDDDDLLLLLLLLEEEEEEEEEPPPPPPPTTTTTTTVVVVVVVVVVVVVVDDDDDDDDEEEEEEEEEVVVVVVVRRRRRRRRRRRTTTTTTTGGGGTTTTTTTYYYYYYYYYYYYRRRRRRRRRRRQQQQQQQQQLLLLLLLLFFFFFFFFFFFHHHHHHHHHHPPPPPPPEEEEEEEEEQQQQQQQQQLLLLLLLLIIIIIIIISSSSSSGGGGKKKKKKKKKEEEEEEEEEDDDDDDDDAAAAAAAAAANNNNNNNNNNNNNNNNFFFFFFFFFFFAAAAARRRRRRRRRRRGGGGHHHHHHHHHHYYYYYYYYYYYYTTTTTTTIIIIIIIIGGGGKKKKKKKKKEEEEEEEEEIIIIIIIIVVVVVVVDDDDDDDDLLLLLLLLAAAAALLLLLLLLDDDDDDDDRRRRRRRRRRRIIIIIIIIRRRRRRRRRRRKKKKKKKKKLLLLLLLLAAAAADDDDDDDDNNNNNNNNCCCCCCTTTTTTTGGGGLLLLLLLLQQQQQQQQQGGGGFFFFFFFFFFFLLLLLLLLVVVVVVVFFFFFFFFFFFNNNNNNNNAAAAAVVVVVVVGGGGGGGGGGGGTTTTTTTGGGGSSSSSSGGGGLLLLLLLLGGGGSSSSSSLLLLLLLLLLLLLLLLLLLLLLLLEEEEEEEEERRRRRRRRRRRLLLLLLLLSSSSSSVVVVVVVDDDDDDDDYYYYYYYYYYYYGGGGKKKKKKKKKKKKKKKKKKSSSSSSKKKKKKKKKLLLLLLLLGGGGFFFFFFFFFFFTTTTTTTVVVVVVVYYYYYYYYYYYYPPPPPPPSSSSSSPPPPPPPQQQQQQQQQVVVVVVVSSSSSSTTTTTTTAAAAAVVVVVVVVVVVVVVEEEEEEEEEPPPPPPPYYYYYYYYYYYYNNNNNNNNSSSSSSVVVVVVVLLLLLLLLSSSSSSTTTTTTTHHHHHHHHHHSSSSSSLLLLLLLLLLLLLLLLEEEEEEEEEHHHHHHHHHHTTTTTTTDDDDDDDDVVVVVVVAAAAAVVVVVVVMMMMMMMMLLLLLLLLDDDDDDDDNNNNNNNNEEEEEEEEEAAAAAIIIIIIIIYYYYYYYYYYYYDDDDDDDDIIIIIIIICCCCCCRRRRRRRRRRRRRRRRRRRRRRSSSSSSLLLLLLLLDDDDDDDDIIIIIIIIEEEEEEEEERRRRRRRRRRRPPPPPPPTTTTTTTYYYYYYYYYYYYTTTTTTTNNNNNNNNLLLLLLLLNNNNNNNNRRRRRRRRRRRLLLLLLLLIIIIIIIIAAAAAQQQQQQQQQVVVVVVVIIIIIIIISSSSSSSSSSSSLLLLLLLLTTTTTTTAAAAASSSSSSLLLLLLLLRRRRRRRRRRRFFFFFFFFFFFDDDDDDDDGGGGAAAAALLLLLLLLNNNNNNNNVVVVVVVDDDDDDDDIIIIIIIITTTTTTTEEEEEEEEEFFFFFFFFFFFQQQQQQQQQTTTTTTTNNNNNNNNLLLLLLLLVVVVVVVPPPPPPPYYYYYYYYYYYYPPPPPPPRRRRRRRRRRRIIIIIIIIHHHHHHHHHHFFFFFFFFFFFMMMMMMMMLLLLLLLLSSSSSSSSSSSSYYYYYYYYYYYYAAAAAPPPPPPPIIIIIIIIIIIIIIIISSSSSSAAAAAEEEEEEEEEKKKKKKKKKAAAAAYYYYYYYYYYYYHHHHHHHHHHEEEEEEEEEQQQQQQQQQLLLLLLLLSSSSSSVVVVVVVAAAAAEEEEEEEEEIIIIIIIITTTTTTTNNNNNNNNAAAAAAAAAAFFFFFFFFFFFEEEEEEEEEPPPPPPPAAAAASSSSSSMMMMMMMMMMMMMMMMVVVVVVVKKKKKKKKKCCCCCCDDDDDDDDPPPPPPPRRRRRRRRRRRHHHHHHHHHHGGGGKKKKKKKKKYYYYYYYYYYYYMMMMMMMMAAAAACCCCCCCCCCCCLLLLLLLLMMMMMMMMYYYYYYYYYYYYRRRRRRRRRRRGGGGDDDDDDDDVVVVVVVVVVVVVVPPPPPPPKKKKKKKKKDDDDDDDDVVVVVVVNNNNNNNNAAAAASSSSSSVVVVVVVAAAAATTTTTTTIIIIIIIIKKKKKKKKKTTTTTTTKKKKKKKKKRRRRRRRRRRRTTTTTTTIIIIIIIIQQQQQQQQQFFFFFFFFFFFVVVVVVVDDDDDDDDWWWWWWWWWWWWWWCCCCCCPPPPPPPTTTTTTTGGGGFFFFFFFFFFFKKKKKKKKKCCCCCCGGGGIIIIIIIINNNNNNNNYYYYYYYYYYYYQQQQQQQQQPPPPPPPPPPPPPPTTTTTTTVVVVVVVVVVVVVVPPPPPPPGGGGGGGGDDDDDDDDLLLLLLLLAAAAAKKKKKKKKKVVVVVVVQQQQQQQQQRRRRRRRRRRRAAAAAVVVVVVVCCCCCCMMMMMMMMIIIIIIIISSSSSSNNNNNNNNSSSSSSTTTTTTTAAAAAIIIIIIIIGGGGEEEEEEEEEIIIIIIIIFFFFFFFFFFFSSSSSSRRRRRRRRRRRLLLLLLLLDDDDDDDDHHHHHHHHHHKKKKKKKKKFFFFFFFFFFFDDDDDDDDLLLLLLLLMMMMMMMMYYYYYYYYYYYYAAAAAKKKKKKKKKRRRRRRRRRRRAAAAAFFFFFFFFFFFVVVVVVVHHHHHHHHHHWWWWWWWWWWWWWWYYYYYYYYYYYYVVVVVVVGGGGEEEEEEEEEGGGGMMMMMMMMEEEEEEEEEEEEEEEEEEGGGGEEEEEEEEEFFFFFFFFFFFSSSSSSEEEEEEEEEAAAAARRRRRRRRRRREEEEEEEEEDDDDDDDDLLLLLLLLAAAAAAAAAALLLLLLLLEEEEEEEEEKKKKKKKKKDDDDDDDDFFFFFFFFFFFEEEEEEEEEEEEEEEEEEVVVVVVVGGGGAAAAAEEEEEEEEESSSSSSAAAAAEEEEEEEEEGGGGAAAAAGGGGEEEEEEEEEGGGGEEEEEEEEEGGGGEEEEEEEEEEEEEEEEEEYYYYYYYYYYYYY

SEQ ID NO: 5 - protein, 3507 aa, Drosophila melanogaster
MMMMMMMMRRRRRRRRRRREEEEEEEEECCCCCCIIIIIIIISSSSSSIIIIIIIIHHHHHHHHHHVVVVVVVGGGGQQQQQQQQQAAAAAGGGGVVVVVVVQQQQQQQQQIIIIIIIIGGGGNNNNNNNNAAAAACCCCCCWWWWWWWWWWWWWWEEEEEEEEELLLLLLLLYYYYYYYYYYYYCCCCCCLLLLLLLLEEEEEEEEEHHHHHHHHHHGGGGIIIIIIIIQQQQQQQQQPPPPPPPDDDDDDDDGGGGQQQQQQQQQMMMMMMMMPPPPPPPSSSSSSDDDDDDDDKKKKKKKKKTTTTTTTVVVVVVVGGGGGGGGGGGGDDDDDDDDDDDDDDDDSSSSSSFFFFFFFFFFFNNNNNNNNTTTTTTTFFFFFFFFFFFFFFFFFFFFFFSSSSSSEEEEEEEEETTTTTTTGGGGAAAAAGGGGKKKKKKKKKHHHHHHHHHHVVVVVVVPPPPPPPRRRRRRRRRRRAAAAAVVVVVVVFFFFFFFFFFFVVVVVVVDDDDDDDDLLLLLLLLEEEEEEEEEPPPPPPPTTTTTTTVVVVVVVVVVVVVVDDDDDDDDEEEEEEEEEVVVVVVVRRRRRRRRRRRTTTTTTTGGGGTTTTTTTYYYYYYYYYYYYRRRRRRRRRRRQQQQQQQQQLLLLLLLLFFFFFFFFFFFHHHHHHHHHHPPPPPPPEEEEEEEEEQQQQQQQQQLLLLLLLLIIIIIIIITTTTTTTGGGGKKKKKKKKKEEEEEEEEEDDDDDDDDAAAAAAAAAANNNNNNNNNNNNNNNNYYYYYYYYYYYYAAAAARRRRRRRRRRRGGGGHHHHHHHHHHYYYYYYYYYYYYTTTTTTTIIIIIIIIGGGGKKKKKKKKKEEEEEEEEEIIIIIIIIVVVVVVVDDDDDDDDLLLLLLLLVVVVVVVLLLLLLLLDDDDDDDDRRRRRRRRRRRIIIIIIIIRRRRRRRRRRRKKKKKKKKKLLLLLLLLAAAAADDDDDDDDQQQQQQQQQCCCCCCTTTTTTTGGGGLLLLLLLLQQQQQQQQQGGGGFFFFFFFFFFFLLLLLLLLIIIIIIIIFFFFFFFFFFFHHHHHHHHHHSSSSSSFFFFFFFFFFFGGGGGGGGGGGGTTTTTTTGGGGSSSSSSGGGGFFFFFFFFFFFTTTTTTTSSSSSSLLLLLLLLLLLLLLLLMMMMMMMMEEEEEEEEERRRRRRRRRRRLLLLLLLLSSSSSSVVVVVVVDDDDDDDDYYYYYYYYYYYYGGGGKKKKKKKKKKKKKKKKKKSSSSSSKKKKKKKKKLLLLLLLLEEEEEEEEEFFFFFFFFFFFAAAAAIIIIIIIIYYYYYYYYYYYYPPPPPPPAAAAAPPPPPPPQQQQQQQQQVVVVVVVSSSSSSTTTTTTTAAAAAVVVVVVVVVVVVVVEEEEEEEEEPPPPPPPYYYYYYYYYYYYNNNNNNNNSSSSSSIIIIIIIILLLLLLLLTTTTTTTTTTTTTTHHHHHHHHHHTTTTTTTTTTTTTTLLLLLLLLEEEEEEEEEHHHHHHHHHHSSSSSSDDDDDDDDCCCCCCAAAAAFFFFFFFFFFFMMMMMMMMVVVVVVVDDDDDDDDNNNNNNNNEEEEEEEEEAAAAAIIIIIIIIYYYYYYYYYYYYDDDDDDDDIIIIIIIICCCCCCRRRRRRRRRRRRRRRRRRRRRRNNNNNNNNLLLLLLLLDDDDDDDDIIIIIIIIEEEEEEEEERRRRRRRRRRRPPPPPPPTTTTTTTYYYYYYYYYYYYTTTTTTTNNNNNNNNLLLLLLLLNNNNNNNNRRRRRRRRRRRLLLLLLLLIIIIIIIIGGGGQQQQQQQQQIIIIIIIIVVVVVVVSSSSSSSSSSSSIIIIIIIITTTTTTTAAAAASSSSSSLLLLLLLLRRRRRRRRRRRFFFFFFFFFFFDDDDDDDDGGGGAAAAALLLLLLLLNNNNNNNNVVVVVVVDDDDDDDDLLLLLLLLTTTTTTTEEEEEEEEEFFFFFFFFFFFQQQQQQQQQTTTTTTTNNNNNNNNLLLLLLLLVVVVVVVPPPPPPPYYYYYYYYYYYYPPPPPPPRRRRRRRRRRRIIIIIIIIHHHHHHHHHHFFFFFFFFFFFPPPPPPPLLLLLLLLVVVVVVVTTTTTTTYYYYYYYYYYYYAAAAAPPPPPPPVVVVVVVIIIIIIIISSSSSSAAAAAEEEEEEEEEKKKKKKKKKAAAAAYYYYYYYYYYYYHHHHHHHHHHEEEEEEEEEQQQQQQQQQLLLLLLLLSSSSSSVVVVVVVAAAAAEEEEEEEEEIIIIIIIITTTTTTTNNNNNNNNAAAAACCCCCCFFFFFFFFFFFEEEEEEEEEPPPPPPPAAAAANNNNNNNNQQQQQQQQQMMMMMMMMVVVVVVVKKKKKKKKKCCCCCCDDDDDDDDPPPPPPPRRRRRRRRRRRHHHHHHHHHHGGGGKKKKKKKKKYYYYYYYYYYYYMMMMMMMMAAAAACCCCCCCCCCCCMMMMMMMMLLLLLLLLYYYYYYYYYYYYRRRRRRRRRRRGGGGDDDDDDDDVVVVVVVVVVVVVVPPPPPPPKKKKKKKKKDDDDDDDDVVVVVVVNNNNNNNNAAAAAAAAAAIIIIIIIIAAAAATTTTTTTIIIIIIIIKKKKKKKKKTTTTTTTKKKKKKKKKRRRRRRRRRRRTTTTTTTIIIIIIIIQQQQQQQQQFFFFFFFFFFFVVVVVVVDDDDDDDDWWWWWWWWWWWWWWCCCCCCPPPPPPPTTTTTTTGGGGFFFFFFFFFFFKKKKKKKKKVVVVVVVGGGGIIIIIIIINNNNNNNNYYYYYYYYYYYYQQQQQQQQQPPPPPPPPPPPPPPTTTTTTTVVVVVVVVVVVVVVPPPPPPPGGGGGGGGDDDDDDDDLLLLLLLLAAAAAKKKKKKKKKVVVVVVVQQQQQQQQQRRRRRRRRRRRAAAAAVVVVVVVCCCCCCMMMMMMMMLLLLLLLLSSSSSSNNNNNNNNTTTTTTTTTTTTTTAAAAAIIIIIIIIAAAAAEEEEEEEEEAAAAAWWWWWWWWWWWWWWAAAAARRRRRRRRRRRLLLLLLLLDDDDDDDDHHHHHHHHHHKKKKKKKKKFFFFFFFFFFFDDDDDDDDLLLLLLLLMMMMMMMMYYYYYYYYYYYYAAAAAKKKKKKKKKRRRRRRRRRRRAAAAAFFFFFFFFFFFVVVVVVVHHHHHHHHHHWWWWWWWWWWWWWWYYYYYYYYYYYYVVVVVVVGGGGEEEEEEEEEGGGGMMMMMMMMEEEEEEEEEEEEEEEEEEGGGGEEEEEEEEEFFFFFFFFFFFSSSSSSEEEEEEEEEAAAAARRRRRRRRRRREEEEEEEEEDDDDDDDDLLLLLLLLAAAAAAAAAALLLLLLLLEEEEEEEEEKKKKKKKKKDDDDDDDDYYYYYYYYYYYYEEEEEEEEEEEEEEEEEEVVVVVVVGGGGMMMMMMMMDDDDDDDDSSSSSSGGGGDDDDDDDDGGGGEEEEEEEEEGGGGEEEEEEEEEGGGGAAAAAEEEEEEEEEEEEEEEEEEYYYYYYYYYYYYY

SEQ ID NO: 6 - protein, 3493 aa, Eleusine indica
MMMMMMMMRRRRRRRRRRREEEEEEEEECCCCCCIIIIIIIISSSSSSIIIIIIIIHHHHHHHHHHIIIIIIIIGGGGQQQQQQQQQAAAAAGGGGIIIIIIIIQQQQQQQQQVVVVVVVGGGGNNNNNNNNAAAAACCCCCCWWWWWWWWWWWWWWEEEEEEEEELLLLLLLLYYYYYYYYYYYYCCCCCCLLLLLLLLEEEEEEEEEHHHHHHHHHHGGGGIIIIIIIIQQQQQQQQQAAAAADDDDDDDDGGGGQQQQQQQQQMMMMMMMMPPPPPPPGGGGDDDDDDDDKKKKKKKKKTTTTTTTIIIIIIIIGGGGGGGGGGGGDDDDDDDDDDDDDDDDAAAAAFFFFFFFFFFFNNNNNNNNTTTTTTTFFFFFFFFFFFFFFFFFFFFFFSSSSSSEEEEEEEEETTTTTTTGGGGAAAAAGGGGKKKKKKKKKHHHHHHHHHHVVVVVVVPPPPPPPRRRRRRRRRRRAAAAAVVVVVVVFFFFFFFFFFFVVVVVVVDDDDDDDDLLLLLLLLEEEEEEEEEPPPPPPPTTTTTTTVVVVVVVIIIIIIIIDDDDDDDDEEEEEEEEEVVVVVVVRRRRRRRRRRRTTTTTTTGGGGTTTTTTTYYYYYYYYYYYYRRRRRRRRRRRQQQQQQQQQLLLLLLLLFFFFFFFFFFFHHHHHHHHHHPPPPPPPEEEEEEEEEQQQQQQQQQLLLLLLLLIIIIIIIISSSSSSGGGGKKKKKKKKKEEEEEEEEEDDDDDDDDAAAAAAAAAANNNNNNNNNNNNNNNNFFFFFFFFFFFAAAAARRRRRRRRRRRGGGGHHHHHHHHHHYYYYYYYYYYYYTTTTTTTIIIIIIIIGGGGKKKKKKKKKEEEEEEEEEIIIIIIIIVVVVVVVDDDDDDDDLLLLLLLLCCCCCCLLLLLLLLDDDDDDDDRRRRRRRRRRRIIIIIIIIRRRRRRRRRRRKKKKKKKKKLLLLLLLLAAAAADDDDDDDDNNNNNNNNCCCCCCTTTTTTTGGGGLLLLLLLLQQQQQQQQQGGGGFFFFFFFFFFFLLLLLLLLVVVVVVVFFFFFFFFFFFNNNNNNNNAAAAAVVVVVVVGGGGGGGGGGGGTTTTTTTGGGGSSSSSSGGGGLLLLLLLLGGGGSSSSSSLLLLLLLLLLLLLLLLLLLLLLLLEEEEEEEEERRRRRRRRRRRLLLLLLLLSSSSSSVVVVVVVDDDDDDDDYYYYYYYYYYYYGGGGKKKKKKKKKKKKKKKKKKSSSSSSKKKKKKKKKLLLLLLLLGGGGFFFFFFFFFFFTTTTTTTVVVVVVVYYYYYYYYYYYYPPPPPPPSSSSSSPPPPPPPQQQQQQQQQVVVVVVVSSSSSSTTTTTTTSSSSSSVVVVVVVVVVVVVVEEEEEEEEEPPPPPPPYYYYYYYYYYYYNNNNNNNNSSSSSSVVVVVVVLLLLLLLLSSSSSSTTTTTTTHHHHHHHHHHSSSSSSLLLLLLLLLLLLLLLLEEEEEEEEEHHHHHHHHHHTTTTTTTDDDDDDDDVVVVVVVAAAAAVVVVVVVLLLLLLLLLLLLLLLLDDDDDDDDNNNNNNNNEEEEEEEEEAAAAAIIIIIIIIYYYYYYYYYYYYDDDDDDDDIIIIIIIICCCCCCRRRRRRRRRRRRRRRRRRRRRRSSSSSSLLLLLLLLDDDDDDDDIIIIIIIIEEEEEEEEERRRRRRRRRRRPPPPPPPTTTTTTTYYYYYYYYYYYYTTTTTTTNNNNNNNNLLLLLLLLNNNNNNNNRRRRRRRRRRRLLLLLLLLVVVVVVVSSSSSSQQQQQQQQQVVVVVVVIIIIIIIISSSSSSSSSSSSLLLLLLLLTTTTTTTAAAAASSSSSSLLLLLLLLRRRRRRRRRRRFFFFFFFFFFFDDDDDDDDGGGGAAAAALLLLLLLLNNNNNNNNVVVVVVVDDDDDDDDVVVVVVVNNNNNNNNEEEEEEEEEFFFFFFFFFFFQQQQQQQQQTTTTTTTNNNNNNNNLLLLLLLLVVVVVVVPPPPPPPYYYYYYYYYYYYPPPPPPPRRRRRRRRRRRIIIIIIIIHHHHHHHHHHFFFFFFFFFFFMMMMMMMMLLLLLLLLSSSSSSSSSSSSYYYYYYYYYYYYAAAAAPPPPPPPVVVVVVVIIIIIIIISSSSSSAAAAAEEEEEEEEEKKKKKKKKKAAAAAYYYYYYYYYYYYHHHHHHHHHHEEEEEEEEEQQQQQQQQQLLLLLLLLSSSSSSVVVVVVVAAAAAEEEEEEEEEIIIIIIIITTTTTTTNNNNNNNNSSSSSSAAAAAFFFFFFFFFFFEEEEEEEEEPPPPPPPSSSSSSSSSSSSMMMMMMMMMMMMMMMMAAAAAKKKKKKKKKCCCCCCDDDDDDDDPPPPPPPRRRRRRRRRRRHHHHHHHHHHGGGGKKKKKKKKKYYYYYYYYYYYYMMMMMMMMAAAAACCCCCCCCCCCCLLLLLLLLMMMMMMMMYYYYYYYYYYYYRRRRRRRRRRRGGGGDDDDDDDDVVVVVVVVVVVVVVPPPPPPPKKKKKKKKKDDDDDDDDVVVVVVVNNNNNNNNAAAAAAAAAAVVVVVVVAAAAATTTTTTTIIIIIIIIKKKKKKKKKTTTTTTTKKKKKKKKKRRRRRRRRRRRTTTTTTTIIIIIIIIQQQQQQQQQFFFFFFFFFFFVVVVVVVDDDDDDDDWWWWWWWWWWWWWWCCCCCCPPPPPPPTTTTTTTGGGGFFFFFFFFFFFKKKKKKKKKCCCCCCGGGGIIIIIIIINNNNNNNNYYYYYYYYYYYYQQQQQQQQQPPPPPPPPPPPPPPSSSSSSVVVVVVVVVVVVVVPPPPPPPGGGGGGGGDDDDDDDDLLLLLLLLAAAAAKKKKKKKKKVVVVVVVQQQQQQQQQRRRRRRRRRRRAAAAAVVVVVVVCCCCCCMMMMMMMMIIIIIIIISSSSSSNNNNNNNNSSSSSSTTTTTTTSSSSSSVVVVVVVVVVVVVVEEEEEEEEEVVVVVVVFFFFFFFFFFFSSSSSSRRRRRRRRRRRIIIIIIIIDDDDDDDDHHHHHHHHHHKKKKKKKKKFFFFFFFFFFFDDDDDDDDLLLLLLLLMMMMMMMMYYYYYYYYYYYYAAAAAKKKKKKKKKRRRRRRRRRRRAAAAAFFFFFFFFFFFVVVVVVVHHHHHHHHHHWWWWWWWWWWWWWWYYYYYYYYYYYYVVVVVVVGGGGEEEEEEEEEGGGGMMMMMMMMEEEEEEEEEEEEEEEEEEGGGGEEEEEEEEEFFFFFFFFFFFSSSSSSEEEEEEEEEAAAAARRRRRRRRRRREEEEEEEEEDDDDDDDDLLLLLLLLAAAAAAAAAALLLLLLLLEEEEEEEEEKKKKKKKKKDDDDDDDDYYYYYYYYYYYYEEEEEEEEEEEEEEEEEEVVVVVVVGGGGAAAAAEEEEEEEEEFFFFFFFFFFFDDDDDDDDEEEEEEEEEGGGGEEEEEEEEEEEEEEEEEEGGGGDDDDDDDDEEEEEEEEEGGGGDDDDDDDDEEEEEEEEEYYYYYYYYYYYYY

SEQ ID NO: 7 - protein, 3537 aa, Emericella nidulans
MMMMMMMMRRRRRRRRRRREEEEEEEEEVVVVVVVIIIIIIIISSSSSSLLLLLLLLNNNNNNNNVVVVVVVGGGGQQQQQQQQQAAAAAGGGGCCCCCCQQQQQQQQQIIIIIIIIAAAAANNNNNNNNSSSSSSCCCCCCWWWWWWWWWWWWWWEEEEEEEEELLLLLLLLYYYYYYYYYYYYCCCCCCLLLLLLLLEEEEEEEEEHHHHHHHHHHGGGGIIIIIIIIQQQQQQQQQPPPPPPPDDDDDDDDGGGGYYYYYYYYYYYYLLLLLLLLTTTTTTTEEEEEEEEEEEEEEEEEERRRRRRRRRRRKKKKKKKKKKKKKKKKKKEEEEEEEEEDDDDDDDDPPPPPPPDDDDDDDDHHHHHHHHHHGGGGFFFFFFFFFFFSSSSSSTTTTTTTFFFFFFFFFFFFFFFFFFFFFFSSSSSSEEEEEEEEETTTTTTTGGGGQQQQQQQQQGGGGKKKKKKKKKYYYYYYYYYYYYVVVVVVVPPPPPPPRRRRRRRRRRRTTTTTTTIIIIIIIIYYYYYYYYYYYYAAAAADDDDDDDDLLLLLLLLEEEEEEEEEPPPPPPPNNNNNNNNVVVVVVVVVVVVVVDDDDDDDDEEEEEEEEEVVVVVVVRRRRRRRRRRRTTTTTTTGGGGTTTTTTTYYYYYYYYYYYYRRRRRRRRRRRSSSSSSLLLLLLLLFFFFFFFFFFFHHHHHHHHHHPPPPPPPEEEEEEEEENNNNNNNNLLLLLLLLIIIIIIIITTTTTTTGGGGKKKKKKKKKEEEEEEEEEDDDDDDDDAAAAASSSSSSNNNNNNNNNNNNNNNNYYYYYYYYYYYYAAAAARRRRRRRRRRRGGGGHHHHHHHHHHYYYYYYYYYYYYTTTTTTTVVVVVVVGGGGKKKKKKKKKEEEEEEEEEMMMMMMMMIIIIIIIIDDDDDDDDQQQQQQQQQVVVVVVVLLLLLLLLDDDDDDDDKKKKKKKKKVVVVVVVRRRRRRRRRRRRRRRRRRRRRRMMMMMMMMAAAAADDDDDDDDSSSSSSCCCCCCSSSSSSGGGGLLLLLLLLQQQQQQQQQGGGGFFFFFFFFFFFLLLLLLLLVVVVVVVFFFFFFFFFFFHHHHHHHHHHSSSSSSFFFFFFFFFFFGGGGGGGGGGGGTTTTTTTGGGGSSSSSSGGGGFFFFFFFFFFFGGGGAAAAALLLLLLLLLLLLLLLLMMMMMMMMEEEEEEEEERRRRRRRRRRRLLLLLLLLSSSSSSVVVVVVVDDDDDDDDYYYYYYYYYYYYGGGGKKKKKKKKKKKKKKKKKKSSSSSSKKKKKKKKKLLLLLLLLEEEEEEEEEFFFFFFFFFFFCCCCCCVVVVVVVYYYYYYYYYYYYPPPPPPPAAAAAPPPPPPPQQQQQQQQQNNNNNNNNAAAAATTTTTTTSSSSSSVVVVVVVVVVVVVVEEEEEEEEEPPPPPPPYYYYYYYYYYYYNNNNNNNNSSSSSSIIIIIIIILLLLLLLLTTTTTTTTTTTTTTHHHHHHHHHHTTTTTTTTTTTTTTLLLLLLLLEEEEEEEEEHHHHHHHHHHSSSSSSDDDDDDDDCCCCCCSSSSSSFFFFFFFFFFFMMMMMMMMVVVVVVVDDDDDDDDNNNNNNNNEEEEEEEEEAAAAAIIIIIIIIYYYYYYYYYYYYDDDDDDDDIIIIIIIICCCCCCRRRRRRRRRRRRRRRRRRRRRRNNNNNNNNLLLLLLLLGGGGIIIIIIIIEEEEEEEEERRRRRRRRRRRPPPPPPPSSSSSSYYYYYYYYYYYYEEEEEEEEENNNNNNNNLLLLLLLLNNNNNNNNRRRRRRRRRRRLLLLLLLLIIIIIIIIAAAAAQQQQQQQQQVVVVVVVVVVVVVVSSSSSSSSSSSSIIIIIIIITTTTTTTAAAAASSSSSSLLLLLLLLRRRRRRRRRRRFFFFFFFFFFFDDDDDDDDGGGGSSSSSSLLLLLLLLNNNNNNNNVVVVVVVDDDDDDDDLLLLLLLLNNNNNNNNEEEEEEEEEFFFFFFFFFFFQQQQQQQQQTTTTTTTNNNNNNNNLLLLLLLLVVVVVVVPPPPPPPYYYYYYYYYYYYPPPPPPPRRRRRRRRRRRIIIIIIIIHHHHHHHHHHFFFFFFFFFFFPPPPPPPLLLLLLLLVVVVVVVAAAAAYYYYYYYYYYYYSSSSSSPPPPPPPVVVVVVVIIIIIIIISSSSSSAAAAADDDDDDDDKKKKKKKKKAAAAASSSSSSHHHHHHHHHHEEEEEEEEEAAAAANNNNNNNNSSSSSSVVVVVVVQQQQQQQQQDDDDDDDDIIIIIIIITTTTTTTMMMMMMMMSSSSSSCCCCCCFFFFFFFFFFFEEEEEEEEEPPPPPPPNNNNNNNNNNNNNNNNQQQQQQQQQMMMMMMMMVVVVVVVKKKKKKKKKCCCCCCDDDDDDDDPPPPPPPRRRRRRRRRRRNNNNNNNNGGGGKKKKKKKKKYYYYYYYYYYYYMMMMMMMMAAAAATTTTTTTCCCCCCLLLLLLLLLLLLLLLLYYYYYYYYYYYYRRRRRRRRRRRGGGGDDDDDDDDVVVVVVVVVVVVVVPPPPPPPRRRRRRRRRRRVVVVVVVDDDDDDDDHHHHHHHHHHAAAAAAAAAAVVVVVVVAAAAATTTTTTTLLLLLLLLKKKKKKKKKTTTTTTTKKKKKKKKKRRRRRRRRRRRTTTTTTTIIIIIIIIQQQQQQQQQFFFFFFFFFFFVVVVVVVDDDDDDDDWWWWWWWWWWWWWWCCCCCCPPPPPPPTTTTTTTGGGGFFFFFFFFFFFKKKKKKKKKIIIIIIIIGGGGIIIIIIIICCCCCCYYYYYYYYYYYYQQQQQQQQQPPPPPPPPPPPPPPQQQQQQQQQQQQQQQQQQVVVVVVVPPPPPPPNNNNNNNNGGGGDDDDDDDDLLLLLLLLAAAAAKKKKKKKKKVVVVVVVNNNNNNNNRRRRRRRRRRRAAAAAVVVVVVVCCCCCCMMMMMMMMLLLLLLLLSSSSSSNNNNNNNNTTTTTTTTTTTTTTAAAAAIIIIIIIISSSSSSEEEEEEEEEAAAAAWWWWWWWWWWWWWWSSSSSSAAAAALLLLLLLLDDDDDDDDHHHHHHHHHHKKKKKKKKKFFFFFFFFFFFDDDDDDDDLLLLLLLLMMMMMMMMYYYYYYYYYYYYSSSSSSKKKKKKKKKRRRRRRRRRRRAAAAAFFFFFFFFFFFVVVVVVVHHHHHHHHHHWWWWWWWWWWWWWWYYYYYYYYYYYYVVVVVVVGGGGEEEEEEEEEGGGGMMMMMMMMEEEEEEEEEEEEEEEEEEGGGGEEEEEEEEEFFFFFFFFFFFSSSSSSEEEEEEEEEAAAAARRRRRRRRRRREEEEEEEEEDDDDDDDDLLLLLLLLAAAAAAAAAALLLLLLLLEEEEEEEEERRRRRRRRRRRDDDDDDDDYYYYYYYYYYYYEEEEEEEEEEEEEEEEEEVVVVVVVAAAAASSSSSSDDDDDDDDSSSSSSLLLLLLLLEEEEEEEEEEEEEEEEEEEEEEEEEEEGGGGEEEEEEEEEEEEEEEEEEVVVVVVVEEEEEEEEEYYYYYYYYYYYYY

SEQ ID NO: 8 - protein, 3517 aa, Entamoeba histolytica
MMMMMMMMRRRRRRRRRRREEEEEEEEEVVVVVVVIIIIIIIITTTTTTTIIIIIIIINNNNNNNNIIIIIIIIGGGGQQQQQQQQQAAAAAGGGGCCCCCCQQQQQQQQQLLLLLLLLGGGGNNNNNNNNKKKKKKKKKCCCCCCWWWWWWWWWWWWWWEEEEEEEEELLLLLLLLFFFFFFFFFFFCCCCCCLLLLLLLLEEEEEEEEEHHHHHHHHHHGGGGIIIIIIIIQQQQQQQQQPPPPPPPDDDDDDDDGGGGTTTTTTTAAAAAIIIIIIIIAAAAANNNNNNNNSSSSSSNNNNNNNNEEEEEEEEEKKKKKKKKKRRRRRRRRRRRSSSSSSVVVVVVVIIIIIIIITTTTTTTGGGGGGGGIIIIIIIIDDDDDDDDTTTTTTTAAAAAYYYYYYYYYYYYNNNNNNNNAAAAAFFFFFFFFFFFFFFFFFFFFFFQQQQQQQQQEEEEEEEEELLLLLLLLQQQQQQQQQNNNNNNNNGGGGRRRRRRRRRRRHHHHHHHHHHVVVVVVVPPPPPPPRRRRRRRRRRRAAAAAIIIIIIIIFFFFFFFFFFFVVVVVVVDDDDDDDDTTTTTTTEEEEEEEEEPPPPPPPTTTTTTTVVVVVVVIIIIIIIIDDDDDDDDEEEEEEEEEIIIIIIIIKKKKKKKKKTTTTTTTGGGGEEEEEEEEEYYYYYYYYYYYYCCCCCCGGGGLLLLLLLLYYYYYYYYYYYYHHHHHHHHHHPPPPPPPEEEEEEEEEHHHHHHHHHHLLLLLLLLIIIIIIIICCCCCCGGGGKKKKKKKKKEEEEEEEEEDDDDDDDDAAAAASSSSSSSSSSSSNNNNNNNNFFFFFFFFFFFAAAAAKKKKKKKKKGGGGKKKKKKKKKTTTTTTTGGGGYYYYYYYYYYYYEEEEEEEEEPPPPPPPLLLLLLLLLLLLLLLLNNNNNNNNQQQQQQQQQTTTTTTTMMMMMMMMDDDDDDDDAAAAAIIIIIIIIRRRRRRRRRRRKKKKKKKKKAAAAATTTTTTTEEEEEEEEENNNNNNNNCCCCCCTTTTTTTGGGGLLLLLLLLQQQQQQQQQGGGGFFFFFFFFFFFFFFFFFFFFFFIIIIIIIIYYYYYYYYYYYYNNNNNNNNSSSSSSVVVVVVVGGGGGGGGGGGGTTTTTTTGGGGSSSSSSGGGGFFFFFFFFFFFTTTTTTTAAAAAAAAAALLLLLLLLCCCCCCEEEEEEEEEKKKKKKKKKLLLLLLLLAAAAADDDDDDDDKKKKKKKKKYYYYYYYYYYYYTTTTTTTKKKKKKKKKKKKKKKKKKTTTTTTTKKKKKKKKKLLLLLLLLNNNNNNNNTTTTTTTVVVVVVVIIIIIIIIWWWWWWWWWWWWWWPPPPPPPSSSSSSPPPPPPPKKKKKKKKKLLLLLLLLSSSSSSSSSSSSGGGGVVVVVVVVVVVVVVEEEEEEEEEPPPPPPPYYYYYYYYYYYYNNNNNNNNAAAAAVVVVVVVLLLLLLLLNNNNNNNNTTTTTTTHHHHHHHHHHAAAAAMMMMMMMMMMMMMMMMKKKKKKKKKFFFFFFFFFFFVVVVVVVNNNNNNNNCCCCCCTTTTTTTFFFFFFFFFFFMMMMMMMMVVVVVVVDDDDDDDDNNNNNNNNEEEEEEEEESSSSSSIIIIIIIIYYYYYYYYYYYYKKKKKKKKKIIIIIIIICCCCCCQQQQQQQQQKKKKKKKKKQQQQQQQQQLLLLLLLLGGGGVVVVVVVHHHHHHHHHHSSSSSSPPPPPPPSSSSSSYYYYYYYYYYYYFFFFFFFFFFFHHHHHHHHHHLLLLLLLLNNNNNNNNQQQQQQQQQLLLLLLLLIIIIIIIIAAAAAQQQQQQQQQAAAAAMMMMMMMMSSSSSSSSSSSSIIIIIIIITTTTTTTAAAAASSSSSSLLLLLLLLRRRRRRRRRRRFFFFFFFFFFFEEEEEEEEEGGGGTTTTTTTLLLLLLLLNNNNNNNNVVVVVVVDDDDDDDDLLLLLLLLNNNNNNNNEEEEEEEEEFFFFFFFFFFFPPPPPPPTTTTTTTNNNNNNNNLLLLLLLLVVVVVVVPPPPPPPFFFFFFFFFFFPPPPPPPRRRRRRRRRRRDDDDDDDDHHHHHHHHHHFFFFFFFFFFFAAAAAMMMMMMMMMMMMMMMMSSSSSSYYYYYYYYYYYYAAAAAPPPPPPPIIIIIIIIVVVVVVVTTTTTTTPPPPPPPEEEEEEEEEKKKKKKKKKAAAAAIIIIIIIIRRRRRRRRRRRQQQQQQQQQTTTTTTTLLLLLLLLSSSSSSVVVVVVVQQQQQQQQQEEEEEEEEELLLLLLLLTTTTTTTSSSSSSSSSSSSLLLLLLLLFFFFFFFFFFFDDDDDDDDPPPPPPPNNNNNNNNSSSSSSLLLLLLLLMMMMMMMMIIIIIIIIQQQQQQQQQCCCCCCDDDDDDDDDDDDDDDDIIIIIIIINNNNNNNNKKKKKKKKKGGGGKKKKKKKKKFFFFFFFFFFFMMMMMMMMSSSSSSCCCCCCCCCCCCMMMMMMMMMMMMMMMMYYYYYYYYYYYYRRRRRRRRRRRGGGGDDDDDDDDVVVVVVVSSSSSSSSSSSSRRRRRRRRRRREEEEEEEEEVVVVVVVNNNNNNNNLLLLLLLLAAAAAVVVVVVVSSSSSSGGGGIIIIIIIIKKKKKKKKKKKKKKKKKKQQQQQQQQQNNNNNNNNTTTTTTTVVVVVVVPPPPPPPFFFFFFFFFFFVVVVVVVGGGGWWWWWWWWWWWWWWCCCCCCPPPPPPPCCCCCCSSSSSSFFFFFFFFFFFKKKKKKKKKCCCCCCGGGGIIIIIIIINNNNNNNNSSSSSSQQQQQQQQQPPPPPPPAAAAATTTTTTTAAAAAVVVVVVVPPPPPPPGGGGSSSSSSSSSSSSYYYYYYYYYYYYAAAAASSSSSSTTTTTTTAAAAARRRRRRRRRRRSSSSSSAAAAACCCCCCMMMMMMMMIIIIIIIIAAAAANNNNNNNNHHHHHHHHHHTTTTTTTAAAAAMMMMMMMMCCCCCCQQQQQQQQQVVVVVVVFFFFFFFFFFFQQQQQQQQQKKKKKKKKKVVVVVVVNNNNNNNNQQQQQQQQQNNNNNNNNFFFFFFFFFFFDDDDDDDDLLLLLLLLMMMMMMMMFFFFFFFFFFFGGGGKKKKKKKKKRRRRRRRRRRRAAAAAFFFFFFFFFFFVVVVVVVHHHHHHHHHHHHHHHHHHHHYYYYYYYYYYYYVVVVVVVGGGGEEEEEEEEEGGGGMMMMMMMMEEEEEEEEEEEEEEEEEENNNNNNNNEEEEEEEEEFFFFFFFFFFFTTTTTTTDDDDDDDDAAAAARRRRRRRRRRRQQQQQQQQQDDDDDDDDLLLLLLLLYYYYYYYYYYYYEEEEEEEEELLLLLLLLEEEEEEEEEVVVVVVVDDDDDDDDYYYYYYYYYYYYAAAAANNNNNNNNLLLLLLLLAAAAALLLLLLLLDDDDDDDDNNNNNNNNTTTTTTTIIIIIIIIEEEEEEEEEGGGGEEEEEEEEESSSSSSMMMMMMMMTTTTTTTAAAAAQQQQQQQQQQ

SEQ ID NO: 9 - protein, 3520 aa, Homarus americanus
MMMMMMMMRRRRRRRRRRREEEEEEEEECCCCCCIIIIIIIISSSSSSIIIIIIIIHHHHHHHHHHVVVVVVVGGGGQQQQQQQQQAAAAAGGGGVVVVVVVQQQQQQQQQMMMMMMMMGGGGNNNNNNNNAAAAAVVVVVVVWWWWWWWWWWWWWWEEEEEEEEELLLLLLLLYYYYYYYYYYYYCCCCCCLLLLLLLLEEEEEEEEEHHHHHHHHHHGGGGIIIIIIIIQQQQQQQQQPPPPPPPDDDDDDDDAAAAAKKKKKKKKKMMMMMMMMPPPPPPPSSSSSSDDDDDDDDKKKKKKKKKTTTTTTTVVVVVVVGGGGVVVVVVVSSSSSSDDDDDDDDDDDDDDDDSSSSSSFFFFFFFFFFFNNNNNNNNTTTTTTTFFFFFFFFFFFFFFFFFFFFFFSSSSSSEEEEEEEEETTTTTTTGGGGAAAAAGGGGKKKKKKKKKHHHHHHHHHHVVVVVVVPPPPPPPRRRRRRRRRRRAAAAAVVVVVVVFFFFFFFFFFFVVVVVVVDDDDDDDDLLLLLLLLEEEEEEEEEPPPPPPPSSSSSSVVVVVVVVVVVVVVDDDDDDDDEEEEEEEEEVVVVVVVRRRRRRRRRRRSSSSSSGGGGVVVVVVVYYYYYYYYYYYYRRRRRRRRRRRQQQQQQQQQLLLLLLLLFFFFFFFFFFFHHHHHHHHHHPPPPPPPEEEEEEEEEQQQQQQQQQLLLLLLLLIIIIIIIITTTTTTTGGGGKKKKKKKKKEEEEEEEEEDDDDDDDDAAAAAAAAAANNNNNNNNNNNNNNNNYYYYYYYYYYYYAAAAARRRRRRRRRRRGGGGHHHHHHHHHHYYYYYYYYYYYYTTTTTTTIIIIIIIIGGGGKKKKKKKKKEEEEEEEEEIIIIIIIIVVVVVVVDDDDDDDDIIIIIIIIVVVVVVVLLLLLLLLDDDDDDDDRRRRRRRRRRRIIIIIIIIRRRRRRRRRRRKKKKKKKKKLLLLLLLLAAAAADDDDDDDDQQQQQQQQQCCCCCCTTTTTTTGGGGLLLLLLLLQQQQQQQQQGGGGFFFFFFFFFFFLLLLLLLLIIIIIIIIFFFFFFFFFFFHHHHHHHHHHSSSSSSFFFFFFFFFFFGGGGGGGGGGGGTTTTTTTGGGGSSSSSSGGGGFFFFFFFFFFFTTTTTTTSSSSSSLLLLLLLLLLLLLLLLMMMMMMMMEEEEEEEEERRRRRRRRRRRLLLLLLLLSSSSSSVVVVVVVDDDDDDDDYYYYYYYYYYYYGGGGKKKKKKKKKKKKKKKKKKSSSSSSKKKKKKKKKLLLLLLLLEEEEEEEEEFFFFFFFFFFFAAAAAVVVVVVVYYYYYYYYYYYYPPPPPPPAAAAAPPPPPPPQQQQQQQQQVVVVVVVAAAAATTTTTTTAAAAAVVVVVVVVVVVVVVEEEEEEEEEPPPPPPPYYYYYYYYYYYYNNNNNNNNSSSSSSIIIIIIIILLLLLLLLTTTTTTTTTTTTTTHHHHHHHHHHTTTTTTTTTTTTTTLLLLLLLLEEEEEEEEEHHHHHHHHHHSSSSSSDDDDDDDDCCCCCCAAAAAFFFFFFFFFFFMMMMMMMMVVVVVVVDDDDDDDDNNNNNNNNEEEEEEEEEAAAAAIIIIIIIIYYYYYYYYYYYYDDDDDDDDIIIIIIIICCCCCCRRRRRRRRRRRRRRRRRRRRRRNNNNNNNNLLLLLLLLDDDDDDDDIIIIIIIIEEEEEEEEERRRRRRRRRRRPPPPPPPSSSSSSYYYYYYYYYYYYTTTTTTTNNNNNNNNLLLLLLLLNNNNNNNNRRRRRRRRRRRLLLLLLLLIIIIIIIIGGGGQQQQQQQQQIIIIIIIIVVVVVVVSSSSSSSSSSSSIIIIIIIITTTTTTTAAAAASSSSSSLLLLLLLLRRRRRRRRRRRFFFFFFFFFFFDDDDDDDDGGGGAAAAALLLLLLLLNNNNNNNNVVVVVVVDDDDDDDDLLLLLLLLTTTTTTTEEEEEEEEEFFFFFFFFFFFQQQQQQQQQTTTTTTTNNNNNNNNLLLLLLLLVVVVVVVPPPPPPPYYYYYYYYYYYYPPPPPPPRRRRRRRRRRRIIIIIIIIHHHHHHHHHHFFFFFFFFFFFPPPPPPPLLLLLLLLVVVVVVVTTTTTTTYYYYYYYYYYYYAAAAAPPPPPPPVVVVVVVIIIIIIIISSSSSSAAAAAEEEEEEEEEKKKKKKKKKAAAAAYYYYYYYYYYYYHHHHHHHHHHEEEEEEEEEQQQQQQQQQLLLLLLLLSSSSSSVVVVVVVAAAAAEEEEEEEEEIIIIIIIITTTTTTTNNNNNNNNAAAAACCCCCCFFFFFFFFFFFEEEEEEEEEPPPPPPPAAAAANNNNNNNNQQQQQQQQQMMMMMMMMVVVVVVVKKKKKKKKKCCCCCCDDDDDDDDPPPPPPPRRRRRRRRRRRHHHHHHHHHHGGGGKKKKKKKKKYYYYYYYYYYYYMMMMMMMMAAAAACCCCCCCCCCCCLLLLLLLLLLLLLLLLYYYYYYYYYYYYRRRRRRRRRRRGGGGDDDDDDDDVVVVVVVVVVVVVVPPPPPPPKKKKKKKKKDDDDDDDDVVVVVVVNNNNNNNNAAAAAAAAAAIIIIIIIIAAAAANNNNNNNNIIIIIIIIKKKKKKKKKTTTTTTTKKKKKKKKKRRRRRRRRRRRTTTTTTTIIIIIIIIQQQQQQQQQFFFFFFFFFFFVVVVVVVDDDDDDDDWWWWWWWWWWWWWWCCCCCCPPPPPPPTTTTTTTGGGGFFFFFFFFFFFKKKKKKKKKVVVVVVVGGGGIIIIIIIINNNNNNNNYYYYYYYYYYYYQQQQQQQQQPPPPPPPPPPPPPPTTTTTTTVVVVVVVVVVVVVVPPPPPPPGGGGAAAAADDDDDDDDLLLLLLLLAAAAAKKKKKKKKKVVVVVVVSSSSSSRRRRRRRRRRRAAAAAVVVVVVVCCCCCCMMMMMMMMLLLLLLLLSSSSSSNNNNNNNNTTTTTTTTTTTTTTAAAAAIIIIIIIIAAAAAEEEEEEEEEAAAAAWWWWWWWWWWWWWWAAAAARRRRRRRRRRRLLLLLLLLDDDDDDDDHHHHHHHHHHKKKKKKKKKFFFFFFFFFFFDDDDDDDDLLLLLLLLMMMMMMMMYYYYYYYYYYYYAAAAAKKKKKKKKKRRRRRRRRRRRAAAAAFFFFFFFFFFFVVVVVVVHHHHHHHHHHWWWWWWWWWWWWWWYYYYYYYYYYYYVVVVVVVGGGGEEEEEEEEEGGGGMMMMMMMMEEEEEEEEEEEEEEEEEEGGGGEEEEEEEEEFFFFFFFFFFFTTTTTTTEEEEEEEEEAAAAARRRRRRRRRRREEEEEEEEEDDDDDDDDLLLLLLLLAAAAAAAAAALLLLLLLLEEEEEEEEEKKKKKKKKKDDDDDDDDYYYYYYYYYYYYEEEEEEEEEEEEEEEEEEVVVVVVVGGGGMMMMMMMMDDDDDDDDSSSSSSAAAAADDDDDDDDGGGGEEEEEEEEEDDDDDDDDIIIIIIIIEEEEEEEEEGGGGGGGGDDDDDDDDEEEEEEEEEYYYYYYYYYYYYY

SEQ ID NO: 10 - protein, 3485 aa, Hordeum vulgare
MMMMMMMMRRRRRRRRRRREEEEEEEEEIIIIIIIIIIIIIIIISSSSSSIIIIIIIIHHHHHHHHHHIIIIIIIIGGGGQQQQQQQQQAAAAAGGGGIIIIIIIIQQQQQQQQQVVVVVVVGGGGNNNNNNNNAAAAACCCCCCWWWWWWWWWWWWWWEEEEEEEEELLLLLLLLYYYYYYYYYYYYCCCCCCLLLLLLLLEEEEEEEEEHHHHHHHHHHGGGGIIIIIIIINNNNNNNNQQQQQQQQQDDDDDDDDGGGGTTTTTTTMMMMMMMMPPPPPPPSSSSSSDDDDDDDDTTTTTTTTTTTTTTVVVVVVVGGGGVVVVVVVAAAAAHHHHHHHHHHDDDDDDDDAAAAAFFFFFFFFFFFNNNNNNNNTTTTTTTFFFFFFFFFFFFFFFFFFFFFFSSSSSSEEEEEEEEETTTTTTTGGGGAAAAAGGGGKKKKKKKKKHHHHHHHHHHVVVVVVVPPPPPPPRRRRRRRRRRRAAAAAIIIIIIIIFFFFFFFFFFFVVVVVVVDDDDDDDDLLLLLLLLEEEEEEEEEPPPPPPPTTTTTTTVVVVVVVIIIIIIIIDDDDDDDDEEEEEEEEEVVVVVVVRRRRRRRRRRRTTTTTTTGGGGAAAAAYYYYYYYYYYYYRRRRRRRRRRRQQQQQQQQQLLLLLLLLFFFFFFFFFFFHHHHHHHHHHPPPPPPPEEEEEEEEEQQQQQQQQQLLLLLLLLIIIIIIIISSSSSSGGGGKKKKKKKKKEEEEEEEEEDDDDDDDDAAAAAAAAAANNNNNNNNNNNNNNNNFFFFFFFFFFFAAAAARRRRRRRRRRRGGGGHHHHHHHHHHYYYYYYYYYYYYTTTTTTTVVVVVVVGGGGKKKKKKKKKEEEEEEEEEIIIIIIIIVVVVVVVDDDDDDDDLLLLLLLLCCCCCCLLLLLLLLDDDDDDDDRRRRRRRRRRRVVVVVVVRRRRRRRRRRRKKKKKKKKKLLLLLLLLAAAAADDDDDDDDNNNNNNNNCCCCCCTTTTTTTGGGGLLLLLLLLQQQQQQQQQGGGGFFFFFFFFFFFLLLLLLLLVVVVVVVFFFFFFFFFFFNNNNNNNNAAAAAVVVVVVVGGGGGGGGGGGGTTTTTTTGGGGSSSSSSGGGGLLLLLLLLGGGGSSSSSSLLLLLLLLLLLLLLLLLLLLLLLLEEEEEEEEERRRRRRRRRRRLLLLLLLLSSSSSSVVVVVVVDDDDDDDDYYYYYYYYYYYYGGGGKKKKKKKKKKKKKKKKKKSSSSSSKKKKKKKKKLLLLLLLLGGGGFFFFFFFFFFFTTTTTTTIIIIIIIIYYYYYYYYYYYYPPPPPPPSSSSSSPPPPPPPQQQQQQQQQVVVVVVVSSSSSSTTTTTTTAAAAAVVVVVVVVVVVVVVEEEEEEEEEPPPPPPPYYYYYYYYYYYYNNNNNNNNSSSSSSVVVVVVVLLLLLLLLSSSSSSTTTTTTTHHHHHHHHHHSSSSSSLLLLLLLLLLLLLLLLEEEEEEEEEHHHHHHHHHHTTTTTTTDDDDDDDDVVVVVVVAAAAAVVVVVVVLLLLLLLLLLLLLLLLDDDDDDDDNNNNNNNNEEEEEEEEEAAAAAIIIIIIIIYYYYYYYYYYYYDDDDDDDDIIIIIIIICCCCCCRRRRRRRRRRRRRRRRRRRRRRSSSSSSLLLLLLLLDDDDDDDDIIIIIIIIEEEEEEEEERRRRRRRRRRRPPPPPPPTTTTTTTYYYYYYYYYYYYTTTTTTTNNNNNNNNLLLLLLLLNNNNNNNNRRRRRRRRRRRLLLLLLLLIIIIIIIISSSSSSQQQQQQQQQIIIIIIIIIIIIIIIISSSSSSSSSSSSLLLLLLLLTTTTTTTTTTTTTTSSSSSSLLLLLLLLRRRRRRRRRRRFFFFFFFFFFFDDDDDDDDGGGGAAAAAIIIIIIIINNNNNNNNVVVVVVVDDDDDDDDVVVVVVVTTTTTTTEEEEEEEEEFFFFFFFFFFFQQQQQQQQQTTTTTTTNNNNNNNNLLLLLLLLVVVVVVVPPPPPPPYYYYYYYYYYYYPPPPPPPRRRRRRRRRRRIIIIIIIIHHHHHHHHHHFFFFFFFFFFFMMMMMMMMLLLLLLLLSSSSSSSSSSSSYYYYYYYYYYYYAAAAAPPPPPPPVVVVVVVIIIIIIIISSSSSSAAAAAEEEEEEEEEKKKKKKKKKAAAAAYYYYYYYYYYYYHHHHHHHHHHEEEEEEEEEQQQQQQQQQLLLLLLLLSSSSSSVVVVVVVPPPPPPPEEEEEEEEEIIIIIIIITTTTTTTNNNNNNNNAAAAAVVVVVVVFFFFFFFFFFFEEEEEEEEEPPPPPPPSSSSSSSSSSSSMMMMMMMMMMMMMMMMAAAAAKKKKKKKKKCCCCCCDDDDDDDDPPPPPPPRRRRRRRRRRRHHHHHHHHHHGGGGKKKKKKKKKYYYYYYYYYYYYMMMMMMMMAAAAACCCCCCCCCCCCLLLLLLLLMMMMMMMMYYYYYYYYYYYYRRRRRRRRRRRGGGGDDDDDDDDVVVVVVVVVVVVVVPPPPPPPKKKKKKKKKDDDDDDDDVVVVVVVNNNNNNNNAAAAAAAAAAVVVVVVVAAAAATTTTTTTIIIIIIIIKKKKKKKKKTTTTTTTKKKKKKKKKRRRRRRRRRRRTTTTTTTVVVVVVVQQQQQQQQQFFFFFFFFFFFVVVVVVVDDDDDDDDWWWWWWWWWWWWWWCCCCCCPPPPPPPTTTTTTTGGGGFFFFFFFFFFFKKKKKKKKKCCCCCCGGGGIIIIIIIINNNNNNNNYYYYYYYYYYYYQQQQQQQQQPPPPPPPPPPPPPPSSSSSSVVVVVVVVVVVVVVPPPPPPPGGGGGGGGDDDDDDDDLLLLLLLLAAAAAKKKKKKKKKVVVVVVVQQQQQQQQQRRRRRRRRRRRAAAAAVVVVVVVCCCCCCMMMMMMMMIIIIIIIISSSSSSNNNNNNNNNNNNNNNNTTTTTTTAAAAAVVVVVVVAAAAAEEEEEEEEEVVVVVVVFFFFFFFFFFFSSSSSSRRRRRRRRRRRIIIIIIIIDDDDDDDDHHHHHHHHHHKKKKKKKKKFFFFFFFFFFFDDDDDDDDLLLLLLLLMMMMMMMMYYYYYYYYYYYYAAAAAKKKKKKKKKRRRRRRRRRRRAAAAAFFFFFFFFFFFVVVVVVVHHHHHHHHHHWWWWWWWWWWWWWWYYYYYYYYYYYYVVVVVVVGGGGEEEEEEEEEGGGGMMMMMMMMEEEEEEEEEEEEEEEEEEGGGGEEEEEEEEEFFFFFFFFFFFSSSSSSEEEEEEEEEAAAAARRRRRRRRRRREEEEEEEEEDDDDDDDDLLLLLLLLAAAAAAAAAALLLLLLLLEEEEEEEEEKKKKKKKKKDDDDDDDDYYYYYYYYYYYYEEEEEEEEEEEEEEEEEEVVVVVVVGGGGAAAAAEEEEEEEEEGGGGAAAAADDDDDDDDDDDDDDDDEEEEEEEEEGGGGDDDDDDDDEEEEEEEEEGGGGDDDDDDDDDDDDDDDDYYYYYYYYYYYYY

SEQ ID NO: 11 - protein, 3525 aa, Homo sapiens
MMMMMMMMRRRRRRRRRRREEEEEEEEECCCCCCIIIIIIIISSSSSSIIIIIIIIHHHHHHHHHHVVVVVVVGGGGQQQQQQQQQAAAAAGGGGVVVVVVVQQQQQQQQQIIIIIIIIGGGGNNNNNNNNAAAAACCCCCCWWWWWWWWWWWWWWEEEEEEEEELLLLLLLLYYYYYYYYYYYYCCCCCCLLLLLLLLEEEEEEEEEHHHHHHHHHHGGGGIIIIIIIIQQQQQQQQQPPPPPPPDDDDDDDDGGGGQQQQQQQQQMMMMMMMMPPPPPPPSSSSSSDDDDDDDDKKKKKKKKKTTTTTTTIIIIIIIIGGGGGGGGGGGGDDDDDDDDDDDDDDDDSSSSSSFFFFFFFFFFFNNNNNNNNTTTTTTTFFFFFFFFFFFFFFFFFFFFFFSSSSSSEEEEEEEEETTTTTTTGGGGAAAAAGGGGKKKKKKKKKHHHHHHHHHHVVVVVVVPPPPPPPRRRRRRRRRRRAAAAAVVVVVVVFFFFFFFFFFFVVVVVVVDDDDDDDDLLLLLLLLEEEEEEEEEPPPPPPPTTTTTTTVVVVVVVIIIIIIIIDDDDDDDDEEEEEEEEEVVVVVVVRRRRRRRRRRRTTTTTTTGGGGTTTTTTTYYYYYYYYYYYYRRRRRRRRRRRQQQQQQQQQLLLLLLLLFFFFFFFFFFFHHHHHHHHHHPPPPPPPEEEEEEEEEQQQQQQQQQLLLLLLLLIIIIIIIITTTTTTTGGGGKKKKKKKKKEEEEEEEEEDDDDDDDDAAAAAAAAAANNNNNNNNNNNNNNNNYYYYYYYYYYYYAAAAARRRRRRRRRRRGGGGHHHHHHHHHHYYYYYYYYYYYYTTTTTTTIIIIIIIIGGGGKKKKKKKKKEEEEEEEEEIIIIIIIIIIIIIIIIDDDDDDDDLLLLLLLLVVVVVVVLLLLLLLLDDDDDDDDRRRRRRRRRRRIIIIIIIIRRRRRRRRRRRKKKKKKKKKLLLLLLLLAAAAADDDDDDDDQQQQQQQQQCCCCCCTTTTTTTGGGGLLLLLLLLQQQQQQQQQGGGGFFFFFFFFFFFLLLLLLLLVVVVVVVFFFFFFFFFFFHHHHHHHHHHSSSSSSFFFFFFFFFFFGGGGGGGGGGGGTTTTTTTGGGGSSSSSSGGGGFFFFFFFFFFFTTTTTTTSSSSSSLLLLLLLLLLLLLLLLMMMMMMMMEEEEEEEEERRRRRRRRRRRLLLLLLLLSSSSSSVVVVVVVDDDDDDDDYYYYYYYYYYYYGGGGKKKKKKKKKKKKKKKKKKSSSSSSKKKKKKKKKLLLLLLLLEEEEEEEEEFFFFFFFFFFFSSSSSSIIIIIIIIYYYYYYYYYYYYPPPPPPPAAAAAPPPPPPPQQQQQQQQQVVVVVVVSSSSSSTTTTTTTAAAAAVVVVVVVVVVVVVVEEEEEEEEEPPPPPPPYYYYYYYYYYYYNNNNNNNNSSSSSSIIIIIIIILLLLLLLLTTTTTTTTTTTTTTHHHHHHHHHHTTTTTTTTTTTTTTLLLLLLLLEEEEEEEEEHHHHHHHHHHSSSSSSDDDDDDDDCCCCCCAAAAAFFFFFFFFFFFMMMMMMMMVVVVVVVDDDDDDDDNNNNNNNNEEEEEEEEEAAAAAIIIIIIIIYYYYYYYYYYYYDDDDDDDDIIIIIIIICCCCCCRRRRRRRRRRRRRRRRRRRRRRNNNNNNNNLLLLLLLLDDDDDDDDIIIIIIIIEEEEEEEEERRRRRRRRRRRPPPPPPPTTTTTTTYYYYYYYYYYYYTTTTTTTNNNNNNNNLLLLLLLLNNNNNNNNRRRRRRRRRRRLLLLLLLLIIIIIIIISSSSSSQQQQQQQQQIIIIIIIIVVVVVVVSSSSSSSSSSSSIIIIIIIITTTTTTTAAAAASSSSSSLLLLLLLLRRRRRRRRRRRFFFFFFFFFFFDDDDDDDDGGGGAAAAALLLLLLLLNNNNNNNNVVVVVVVDDDDDDDDLLLLLLLLTTTTTTTEEEEEEEEEFFFFFFFFFFFQQQQQQQQQTTTTTTTNNNNNNNNLLLLLLLLVVVVVVVPPPPPPPYYYYYYYYYYYYPPPPPPPRRRRRRRRRRRIIIIIIIIHHHHHHHHHHFFFFFFFFFFFPPPPPPPLLLLLLLLAAAAATTTTTTTYYYYYYYYYYYYAAAAAPPPPPPPVVVVVVVIIIIIIIISSSSSSAAAAAEEEEEEEEEKKKKKKKKKAAAAAYYYYYYYYYYYYHHHHHHHHHHEEEEEEEEEQQQQQQQQQLLLLLLLLSSSSSSVVVVVVVAAAAAEEEEEEEEEIIIIIIIITTTTTTTNNNNNNNNAAAAACCCCCCFFFFFFFFFFFEEEEEEEEEPPPPPPPAAAAANNNNNNNNQQQQQQQQQMMMMMMMMVVVVVVVKKKKKKKKKCCCCCCDDDDDDDDPPPPPPPRRRRRRRRRRRHHHHHHHHHHGGGGKKKKKKKKKYYYYYYYYYYYYMMMMMMMMAAAAACCCCCCCCCCCCLLLLLLLLLLLLLLLLYYYYYYYYYYYYRRRRRRRRRRRGGGGDDDDDDDDVVVVVVVVVVVVVVPPPPPPPKKKKKKKKKDDDDDDDDVVVVVVVNNNNNNNNAAAAAAAAAAIIIIIIIIAAAAATTTTTTTIIIIIIIIKKKKKKKKKTTTTTTTKKKKKKKKKRRRRRRRRRRRSSSSSSIIIIIIIIQQQQQQQQQFFFFFFFFFFFVVVVVVVDDDDDDDDWWWWWWWWWWWWWWCCCCCCPPPPPPPTTTTTTTGGGGFFFFFFFFFFFKKKKKKKKKVVVVVVVGGGGIIIIIIIINNNNNNNNYYYYYYYYYYYYQQQQQQQQQPPPPPPPPPPPPPPTTTTTTTVVVVVVVVVVVVVVPPPPPPPGGGGGGGGDDDDDDDDLLLLLLLLAAAAAKKKKKKKKKVVVVVVVQQQQQQQQQRRRRRRRRRRRAAAAAVVVVVVVCCCCCCMMMMMMMMLLLLLLLLSSSSSSNNNNNNNNTTTTTTTTTTTTTTAAAAAIIIIIIIIAAAAAEEEEEEEEEAAAAAWWWWWWWWWWWWWWAAAAARRRRRRRRRRRLLLLLLLLDDDDDDDDHHHHHHHHHHKKKKKKKKKFFFFFFFFFFFDDDDDDDDLLLLLLLLMMMMMMMMYYYYYYYYYYYYAAAAAKKKKKKKKKRRRRRRRRRRRAAAAAFFFFFFFFFFFVVVVVVVHHHHHHHHHHWWWWWWWWWWWWWWYYYYYYYYYYYYVVVVVVVGGGGEEEEEEEEEGGGGMMMMMMMMEEEEEEEEEEEEEEEEEEGGGGEEEEEEEEEFFFFFFFFFFFSSSSSSEEEEEEEEEAAAAARRRRRRRRRRREEEEEEEEEDDDDDDDDMMMMMMMMAAAAAAAAAALLLLLLLLEEEEEEEEEKKKKKKKKKDDDDDDDDYYYYYYYYYYYYEEEEEEEEEEEEEEEEEEVVVVVVVGGGGVVVVVVVDDDDDDDDSSSSSSVVVVVVVEEEEEEEEEGGGGEEEEEEEEEGGGGEEEEEEEEEEEEEEEEEEEEEEEEEEEGGGGEEEEEEEEEEEEEEEEEEYYYYYYYYYYYYY

SEQ ID NO: 12 - protein, 3493 aa, Zea mays
MMMMMMMMRRRRRRRRRRREEEEEEEEECCCCCCIIIIIIIISSSSSSIIIIIIIIHHHHHHHHHHIIIIIIIIGGGGQQQQQQQQQAAAAAGGGGIIIIIIIIQQQQQQQQQVVVVVVVGGGGNNNNNNNNAAAAACCCCCCWWWWWWWWWWWWWWEEEEEEEEELLLLLLLLYYYYYYYYYYYYCCCCCCLLLLLLLLEEEEEEEEEHHHHHHHHHHGGGGIIIIIIIIQQQQQQQQQAAAAADDDDDDDDGGGGQQQQQQQQQMMMMMMMMPPPPPPPGGGGDDDDDDDDKKKKKKKKKTTTTTTTIIIIIIIIGGGGGGGGGGGGDDDDDDDDDDDDDDDDAAAAAFFFFFFFFFFFNNNNNNNNTTTTTTTFFFFFFFFFFFFFFFFFFFFFFSSSSSSEEEEEEEEETTTTTTTGGGGAAAAAGGGGKKKKKKKKKHHHHHHHHHHVVVVVVVPPPPPPPRRRRRRRRRRRAAAAAVVVVVVVFFFFFFFFFFFVVVVVVVDDDDDDDDLLLLLLLLEEEEEEEEEPPPPPPPTTTTTTTVVVVVVVIIIIIIIIDDDDDDDDEEEEEEEEEVVVVVVVRRRRRRRRRRRTTTTTTTGGGGTTTTTTTYYYYYYYYYYYYRRRRRRRRRRRQQQQQQQQQLLLLLLLLFFFFFFFFFFFHHHHHHHHHHPPPPPPPEEEEEEEEEQQQQQQQQQLLLLLLLLIIIIIIIISSSSSSGGGGKKKKKKKKKEEEEEEEEEDDDDDDDDAAAAAAAAAANNNNNNNNNNNNNNNNFFFFFFFFFFFAAAAARRRRRRRRRRRGGGGHHHHHHHHHHYYYYYYYYYYYYTTTTTTTIIIIIIIIGGGGKKKKKKKKKEEEEEEEEEIIIIIIIIVVVVVVVDDDDDDDDLLLLLLLLCCCCCCLLLLLLLLDDDDDDDDRRRRRRRRRRRIIIIIIIIRRRRRRRRRRRKKKKKKKKKLLLLLLLLAAAAADDDDDDDDNNNNNNNNCCCCCCTTTTTTTGGGGLLLLLLLLQQQQQQQQQGGGGFFFFFFFFFFFLLLLLLLLVVVVVVVFFFFFFFFFFFNNNNNNNNAAAAAVVVVVVVGGGGGGGGGGGGTTTTTTTGGGGSSSSSSGGGGLLLLLLLLGGGGSSSSSSLLLLLLLLLLLLLLLLLLLLLLLLEEEEEEEEERRRRRRRRRRRLLLLLLLLSSSSSSVVVVVVVDDDDDDDDYYYYYYYYYYYYGGGGKKKKKKKKKKKKKKKKKKSSSSSSKKKKKKKKKLLLLLLLLGGGGFFFFFFFFFFFTTTTTTTVVVVVVVYYYYYYYYYYYYPPPPPPPSSSSSSPPPPPPPQQQQQQQQQVVVVVVVSSSSSSTTTTTTTSSSSSSVVVVVVVVVVVVVVEEEEEEEEEPPPPPPPYYYYYYYYYYYYNNNNNNNNSSSSSSVVVVVVVLLLLLLLLSSSSSSTTTTTTTHHHHHHHHHHSSSSSSLLLLLLLLLLLLLLLLEEEEEEEEEHHHHHHHHHHTTTTTTTDDDDDDDDVVVVVVVAAAAAIIIIIIIILLLLLLLLLLLLLLLLDDDDDDDDNNNNNNNNEEEEEEEEEAAAAAIIIIIIIIYYYYYYYYYYYYDDDDDDDDIIIIIIIICCCCCCRRRRRRRRRRRRRRRRRRRRRRSSSSSSLLLLLLLLDDDDDDDDIIIIIIIIEEEEEEEEERRRRRRRRRRRPPPPPPPTTTTTTTYYYYYYYYYYYYTTTTTTTNNNNNNNNLLLLLLLLNNNNNNNNRRRRRRRRRRRLLLLLLLLVVVVVVVSSSSSSQQQQQQQQQVVVVVVVIIIIIIIISSSSSSSSSSSSLLLLLLLLTTTTTTTAAAAASSSSSSLLLLLLLLRRRRRRRRRRRFFFFFFFFFFFDDDDDDDDGGGGAAAAALLLLLLLLNNNNNNNNVVVVVVVDDDDDDDDVVVVVVVNNNNNNNNEEEEEEEEEFFFFFFFFFFFQQQQQQQQQTTTTTTTNNNNNNNNLLLLLLLLVVVVVVVPPPPPPPYYYYYYYYYYYYPPPPPPPRRRRRRRRRRRIIIIIIIIHHHHHHHHHHFFFFFFFFFFFMMMMMMMMLLLLLLLLSSSSSSSSSSSSYYYYYYYYYYYYAAAAAPPPPPPPVVVVVVVIIIIIIIISSSSSSAAAAAEEEEEEEEEKKKKKKKKKAAAAAYYYYYYYYYYYYHHHHHHHHHHEEEEEEEEEQQQQQQQQQLLLLLLLLSSSSSSVVVVVVVAAAAAEEEEEEEEEIIIIIIIITTTTTTTNNNNNNNNSSSSSSAAAAAFFFFFFFFFFFEEEEEEEEEPPPPPPPSSSSSSSSSSSSMMMMMMMMMMMMMMMMAAAAAKKKKKKKKKCCCCCCDDDDDDDDPPPPPPPRRRRRRRRRRRHHHHHHHHHHGGGGKKKKKKKKKYYYYYYYYYYYYMMMMMMMMAAAAACCCCCCCCCCCCLLLLLLLLMMMMMMMMYYYYYYYYYYYYRRRRRRRRRRRGGGGDDDDDDDDVVVVVVVVVVVVVVPPPPPPPKKKKKKKKKDDDDDDDDVVVVVVVNNNNNNNNAAAAAAAAAAVVVVVVVAAAAATTTTTTTIIIIIIIIKKKKKKKKKTTTTTTTKKKKKKKKKRRRRRRRRRRRTTTTTTTIIIIIIIIQQQQQQQQQFFFFFFFFFFFVVVVVVVDDDDDDDDWWWWWWWWWWWWWWCCCCCCPPPPPPPTTTTTTTGGGGFFFFFFFFFFFKKKKKKKKKCCCCCCGGGGIIIIIIIINNNNNNNNYYYYYYYYYYYYQQQQQQQQQPPPPPPPPPPPPPPSSSSSSVVVVVVVVVVVVVVPPPPPPPGGGGGGGGDDDDDDDDLLLLLLLLAAAAAKKKKKKKKKVVVVVVVQQQQQQQQQRRRRRRRRRRRAAAAAVVVVVVVCCCCCCMMMMMMMMIIIIIIIISSSSSSNNNNNNNNSSSSSSTTTTTTTSSSSSSVVVVVVVVVVVVVVEEEEEEEEEVVVVVVVFFFFFFFFFFFSSSSSSRRRRRRRRRRRIIIIIIIIDDDDDDDDHHHHHHHHHHKKKKKKKKKFFFFFFFFFFFDDDDDDDDLLLLLLLLMMMMMMMMYYYYYYYYYYYYAAAAAKKKKKKKKKRRRRRRRRRRRAAAAAFFFFFFFFFFFVVVVVVVHHHHHHHHHHWWWWWWWWWWWWWWYYYYYYYYYYYYVVVVVVVGGGGEEEEEEEEEGGGGMMMMMMMMEEEEEEEEEEEEEEEEEEGGGGEEEEEEEEEFFFFFFFFFFFSSSSSSEEEEEEEEEAAAAARRRRRRRRRRREEEEEEEEEDDDDDDDDLLLLLLLLAAAAAAAAAALLLLLLLLEEEEEEEEEKKKKKKKKKDDDDDDDDYYYYYYYYYYYYEEEEEEEEEEEEEEEEEEVVVVVVVGGGGAAAAAEEEEEEEEEFFFFFFFFFFFDDDDDDDDEEEEEEEEEGGGGEEEEEEEEEDDDDDDDDGGGGDDDDDDDDEEEEEEEEEGGGGDDDDDDDDEEEEEEEEEYYYYYYYYYYYYY

SEQ ID NO: 13 - protein, 3524 aa, Mus musculus
MMMMMMMMRRRRRRRRRRREEEEEEEEECCCCCCIIIIIIIISSSSSSIIIIIIIIHHHHHHHHHHVVVVVVVGGGGQQQQQQQQQAAAAAGGGGVVVVVVVQQQQQQQQQIIIIIIIIGGGGNNNNNNNNAAAAACCCCCCWWWWWWWWWWWWWWEEEEEEEEELLLLLLLLYYYYYYYYYYYYCCCCCCLLLLLLLLEEEEEEEEEHHHHHHHHHHGGGGIIIIIIIIQQQQQQQQQPPPPPPPDDDDDDDDGGGGQQQQQQQQQMMMMMMMMPPPPPPPSSSSSSDDDDDDDDKKKKKKKKKTTTTTTTIIIIIIIIGGGGGGGGGGGGDDDDDDDDDDDDDDDDSSSSSSFFFFFFFFFFFNNNNNNNNTTTTTTTFFFFFFFFFFFFFFFFFFFFFFSSSSSSEEEEEEEEETTTTTTTGGGGAAAAAGGGGKKKKKKKKKHHHHHHHHHHVVVVVVVPPPPPPPRRRRRRRRRRRAAAAAVVVVVVVFFFFFFFFFFFVVVVVVVDDDDDDDDLLLLLLLLEEEEEEEEEPPPPPPPTTTTTTTVVVVVVVIIIIIIIIDDDDDDDDEEEEEEEEEVVVVVVVRRRRRRRRRRRTTTTTTTGGGGTTTTTTTYYYYYYYYYYYYRRRRRRRRRRRQQQQQQQQQLLLLLLLLFFFFFFFFFFFHHHHHHHHHHPPPPPPPEEEEEEEEEQQQQQQQQQLLLLLLLLIIIIIIIITTTTTTTGGGGKKKKKKKKKEEEEEEEEEDDDDDDDDAAAAAAAAAANNNNNNNNNNNNNNNNYYYYYYYYYYYYAAAAARRRRRRRRRRRGGGGHHHHHHHHHHYYYYYYYYYYYYTTTTTTTIIIIIIIIGGGGKKKKKKKKKEEEEEEEEEIIIIIIIIIIIIIIIIDDDDDDDDLLLLLLLLVVVVVVVLLLLLLLLDDDDDDDDRRRRRRRRRRRIIIIIIIIRRRRRRRRRRRKKKKKKKKKLLLLLLLLAAAAADDDDDDDDQQQQQQQQQCCCCCCTTTTTTTGGGGLLLLLLLLQQQQQQQQQGGGGFFFFFFFFFFFLLLLLLLLVVVVVVVFFFFFFFFFFFHHHHHHHHHHSSSSSSFFFFFFFFFFFGGGGGGGGGGGGTTTTTTTGGGGSSSSSSGGGGFFFFFFFFFFFTTTTTTTSSSSSSLLLLLLLLLLLLLLLLMMMMMMMMEEEEEEEEERRRRRRRRRRRLLLLLLLLSSSSSSVVVVVVVDDDDDDDDYYYYYYYYYYYYGGGGKKKKKKKKKKKKKKKKKKSSSSSSKKKKKKKKKLLLLLLLLEEEEEEEEEFFFFFFFFFFFSSSSSSIIIIIIIIYYYYYYYYYYYYPPPPPPPAAAAAPPPPPPPQQQQQQQQQVVVVVVVSSSSSSTTTTTTTAAAAAVVVVVVVVVVVVVVEEEEEEEEEPPPPPPPYYYYYYYYYYYYNNNNNNNNSSSSSSIIIIIIIILLLLLLLLTTTTTTTTTTTTTTHHHHHHHHHHTTTTTTTTTTTTTTLLLLLLLLEEEEEEEEEHHHHHHHHHHSSSSSSDDDDDDDDCCCCCCAAAAAFFFFFFFFFFFMMMMMMMMVVVVVVVDDDDDDDDNNNNNNNNEEEEEEEEEAAAAAIIIIIIIIYYYYYYYYYYYYDDDDDDDDIIIIIIIICCCCCCRRRRRRRRRRRRRRRRRRRRRRNNNNNNNNLLLLLLLLDDDDDDDDIIIIIIIIEEEEEEEEERRRRRRRRRRRPPPPPPPTTTTTTTYYYYYYYYYYYYTTTTTTTNNNNNNNNLLLLLLLLNNNNNNNNRRRRRRRRRRRLLLLLLLLIIIIIIIIGGGGQQQQQQQQQIIIIIIIIVVVVVVVSSSSSSSSSSSSIIIIIIIITTTTTTTAAAAASSSSSSLLLLLLLLRRRRRRRRRRRFFFFFFFFFFFDDDDDDDDGGGGAAAAALLLLLLLLNNNNNNNNVVVVVVVDDDDDDDDLLLLLLLLTTTTTTTEEEEEEEEEFFFFFFFFFFFQQQQQQQQQTTTTTTTNNNNNNNNLLLLLLLLVVVVVVVPPPPPPPYYYYYYYYYYYYPPPPPPPRRRRRRRRRRRIIIIIIIIHHHHHHHHHHFFFFFFFFFFFPPPPPPPLLLLLLLLAAAAATTTTTTTYYYYYYYYYYYYAAAAAPPPPPPPVVVVVVVIIIIIIIISSSSSSAAAAAEEEEEEEEEKKKKKKKKKAAAAAYYYYYYYYYYYYHHHHHHHHHHEEEEEEEEEQQQQQQQQQLLLLLLLLSSSSSSVVVVVVVAAAAAEEEEEEEEEIIIIIIIITTTTTTTNNNNNNNNAAAAACCCCCCFFFFFFFFFFFEEEEEEEEEPPPPPPPAAAAANNNNNNNNQQQQQQQQQMMMMMMMMVVVVVVVKKKKKKKKKCCCCCCDDDDDDDDPPPPPPPRRRRRRRRRRRHHHHHHHHHHGGGGKKKKKKKKKYYYYYYYYYYYYMMMMMMMMAAAAACCCCCCCCCCCCLLLLLLLLLLLLLLLLYYYYYYYYYYYYRRRRRRRRRRRGGGGDDDDDDDDVVVVVVVVVVVVVVPPPPPPPKKKKKKKKKDDDDDDDDVVVVVVVNNNNNNNNAAAAAAAAAAIIIIIIIIAAAAATTTTTTTIIIIIIIIKKKKKKKKKTTTTTTTKKKKKKKKKRRRRRRRRRRRTTTTTTTIIIIIIIIQQQQQQQQQFFFFFFFFFFFVVVVVVVDDDDDDDDWWWWWWWWWWWWWWCCCCCCPPPPPPPTTTTTTTGGGGFFFFFFFFFFFKKKKKKKKKVVVVVVVGGGGIIIIIIIINNNNNNNNYYYYYYYYYYYYQQQQQQQQQPPPPPPPPPPPPPPTTTTTTTVVVVVVVVVVVVVVPPPPPPPGGGGGGGGDDDDDDDDLLLLLLLLAAAAAKKKKKKKKKVVVVVVVQQQQQQQQQRRRRRRRRRRRAAAAAVVVVVVVCCCCCCMMMMMMMMLLLLLLLLSSSSSSNNNNNNNNTTTTTTTTTTTTTTAAAAAIIIIIIIIAAAAAEEEEEEEEEAAAAAWWWWWWWWWWWWWWAAAAARRRRRRRRRRRLLLLLLLLDDDDDDDDHHHHHHHHHHKKKKKKKKKFFFFFFFFFFFDDDDDDDDLLLLLLLLMMMMMMMMYYYYYYYYYYYYAAAAAKKKKKKKKKRRRRRRRRRRRAAAAAFFFFFFFFFFFVVVVVVVHHHHHHHHHHWWWWWWWWWWWWWWYYYYYYYYYYYYVVVVVVVGGGGEEEEEEEEEGGGGMMMMMMMMEEEEEEEEEEEEEEEEEEGGGGEEEEEEEEEFFFFFFFFFFFSSSSSSEEEEEEEEEAAAAARRRRRRRRRRREEEEEEEEEDDDDDDDDMMMMMMMMAAAAAAAAAALLLLLLLLEEEEEEEEEKKKKKKKKKDDDDDDDDYYYYYYYYYYYYEEEEEEEEEEEEEEEEEEVVVVVVVGGGGVVVVVVVDDDDDDDDSSSSSSVVVVVVVEEEEEEEEEGGGGEEEEEEEEEGGGGEEEEEEEEEEEEEEEEEEEEEEEEEEEGGGGEEEEEEEEEEEEEEEEEEYYYYYYYYYYYYY

SEQ ID NO: 14 - protein, 3533 aa, Neurospora crassa
MMMMMMMMRRRRRRRRRRRGGGGEEEEEEEEEVVVVVVVVVVVVVVHHHHHHHHHHIIIIIIIIHHHHHHHHHHLLLLLLLLGGGGQQQQQQQQQAAAAAGGGGTTTTTTTQQQQQQQQQLLLLLLLLGGGGNNNNNNNNSSSSSSAAAAAWWWWWWWWWWWWWWEEEEEEEEELLLLLLLLYYYYYYYYYYYYLLLLLLLLLLLLLLLLEEEEEEEEEHHHHHHHHHHGGGGLLLLLLLLTTTTTTTQQQQQQQQQDDDDDDDDGGGGRRRRRRRRRRRKKKKKKKKKDDDDDDDDPPPPPPPDDDDDDDDSSSSSSTTTTTTTVVVVVVVAAAAAGGGGEEEEEEEEEGGGGGGGGSSSSSSYYYYYYYYYYYYDDDDDDDDTTTTTTTFFFFFFFFFFFFFFFFFFFFFFTTTTTTTEEEEEEEEESSSSSSSSSSSSNNNNNNNNGGGGKKKKKKKKKYYYYYYYYYYYYVVVVVVVPPPPPPPRRRRRRRRRRRSSSSSSLLLLLLLLFFFFFFFFFFFVVVVVVVDDDDDDDDLLLLLLLLDDDDDDDDPPPPPPPSSSSSSPPPPPPPIIIIIIIIDDDDDDDDEEEEEEEEEIIIIIIIIRRRRRRRRRRRTTTTTTTGGGGPPPPPPPYYYYYYYYYYYYRRRRRRRRRRRQQQQQQQQQLLLLLLLLFFFFFFFFFFFHHHHHHHHHHPPPPPPPEEEEEEEEELLLLLLLLLLLLLLLLIIIIIIIISSSSSSGGGGKKKKKKKKKEEEEEEEEEDDDDDDDDAAAAAAAAAANNNNNNNNNNNNNNNNYYYYYYYYYYYYAAAAARRRRRRRRRRRGGGGHHHHHHHHHHYYYYYYYYYYYYTTTTTTTVVVVVVVGGGGKKKKKKKKKEEEEEEEEEMMMMMMMMAAAAAEEEEEEEEENNNNNNNNVVVVVVVLLLLLLLLDDDDDDDDRRRRRRRRRRRIIIIIIIIRRRRRRRRRRRKKKKKKKKKIIIIIIIITTTTTTTDDDDDDDDNNNNNNNNCCCCCCHHHHHHHHHHSSSSSSLLLLLLLLQQQQQQQQQGGGGFFFFFFFFFFFLLLLLLLLVVVVVVVFFFFFFFFFFFHHHHHHHHHHSSSSSSFFFFFFFFFFFGGGGGGGGGGGGTTTTTTTGGGGSSSSSSGGGGFFFFFFFFFFFGGGGAAAAALLLLLLLLVVVVVVVLLLLLLLLEEEEEEEEERRRRRRRRRRRLLLLLLLLAAAAAQQQQQQQQQDDDDDDDDYYYYYYYYYYYYAAAAAKKKKKKKKKKKKKKKKKKCCCCCCKKKKKKKKKLLLLLLLLEEEEEEEEEFFFFFFFFFFFSSSSSSVVVVVVVYYYYYYYYYYYYPPPPPPPAAAAAPPPPPPPRRRRRRRRRRRVVVVVVVAAAAATTTTTTTAAAAAVVVVVVVVVVVVVVEEEEEEEEEPPPPPPPYYYYYYYYYYYYNNNNNNNNAAAAAVVVVVVVLLLLLLLLAAAAATTTTTTTHHHHHHHHHHSSSSSSTTTTTTTLLLLLLLLEEEEEEEEEHHHHHHHHHHSSSSSSDDDDDDDDVVVVVVVTTTTTTTFFFFFFFFFFFLLLLLLLLVVVVVVVDDDDDDDDNNNNNNNNEEEEEEEEEAAAAAGGGGMMMMMMMMTTTTTTTCCCCCCRRRRRRRRRRRRRRRRRRRRRRNNNNNNNNLLLLLLLLDDDDDDDDIIIIIIIIPPPPPPPRRRRRRRRRRRPPPPPPPSSSSSSYYYYYYYYYYYYEEEEEEEEEHHHHHHHHHHLLLLLLLLNNNNNNNNRRRRRRRRRRRLLLLLLLLIIIIIIIIAAAAAQQQQQQQQQVVVVVVVVVVVVVVSSSSSSSSSSSSIIIIIIIITTTTTTTSSSSSSSSSSSSLLLLLLLLRRRRRRRRRRRFFFFFFFFFFFDDDDDDDDGGGGAAAAALLLLLLLLNNNNNNNNVVVVVVVDDDDDDDDLLLLLLLLNNNNNNNNEEEEEEEEEFFFFFFFFFFFQQQQQQQQQTTTTTTTNNNNNNNNLLLLLLLLVVVVVVVPPPPPPPFFFFFFFFFFFPPPPPPPRRRRRRRRRRRVVVVVVVHHHHHHHHHHYYYYYYYYYYYYPPPPPPPLLLLLLLLIIIIIIIISSSSSSYYYYYYYYYYYYAAAAAPPPPPPPVVVVVVVIIIIIIIISSSSSSAAAAATTTTTTTKKKKKKKKKSSSSSSAAAAAHHHHHHHHHHEEEEEEEEESSSSSSFFFFFFFFFFFKKKKKKKKKTTTTTTTSSSSSSEEEEEEEEELLLLLLLLTTTTTTTLLLLLLLLQQQQQQQQQCCCCCCFFFFFFFFFFFEEEEEEEEEPPPPPPPNNNNNNNNNNNNNNNNQQQQQQQQQMMMMMMMMVVVVVVVVVVVVVVCCCCCCDDDDDDDDPPPPPPPRRRRRRRRRRRNNNNNNNNGGGGKKKKKKKKKYYYYYYYYYYYYMMMMMMMMAAAAAVVVVVVVAAAAALLLLLLLLLLLLLLLLYYYYYYYYYYYYRRRRRRRRRRRGGGGDDDDDDDDVVVVVVVVVVVVVVPPPPPPPRRRRRRRRRRRDDDDDDDDTTTTTTTSSSSSSAAAAAAAAAAVVVVVVVAAAAAAAAAALLLLLLLLKKKKKKKKKAAAAAKKKKKKKKKSSSSSSSSSSSSFFFFFFFFFFFNNNNNNNNLLLLLLLLVVVVVVVEEEEEEEEEWWWWWWWWWWWWWWCCCCCCPPPPPPPTTTTTTTGGGGFFFFFFFFFFFKKKKKKKKKIIIIIIIIGGGGIIIIIIIINNNNNNNNHHHHHHHHHHQQQQQQQQQKKKKKKKKKPPPPPPPMMMMMMMMSSSSSSVVVVVVVPPPPPPPTTTTTTTAAAAASSSSSSPPPPPPPAAAAADDDDDDDDGGGGGGGGLLLLLLLLAAAAASSSSSSVVVVVVVDDDDDDDDRRRRRRRRRRRSSSSSSVVVVVVVSSSSSSMMMMMMMMLLLLLLLLSSSSSSNNNNNNNNTTTTTTTTTTTTTTAAAAAIIIIIIIIAAAAAEEEEEEEEEAAAAAWWWWWWWWWWWWWWSSSSSSRRRRRRRRRRRLLLLLLLLDDDDDDDDHHHHHHHHHHKKKKKKKKKFFFFFFFFFFFDDDDDDDDLLLLLLLLMMMMMMMMYYYYYYYYYYYYSSSSSSKKKKKKKKKRRRRRRRRRRRAAAAAFFFFFFFFFFFVVVVVVVHHHHHHHHHHWWWWWWWWWWWWWWYYYYYYYYYYYYVVVVVVVGGGGEEEEEEEEEGGGGMMMMMMMMEEEEEEEEEEEEEEEEEEGGGGEEEEEEEEEFFFFFFFFFFFSSSSSSEEEEEEEEEAAAAARRRRRRRRRRREEEEEEEEEDDDDDDDDLLLLLLLLRRRRRRRRRRRSSSSSSLLLLLLLLEEEEEEEEEKKKKKKKKKDDDDDDDDYYYYYYYYYYYYEEEEEEEEEEEEEEEEEEVVVVVVVAAAAAGGGGDDDDDDDDYYYYYYYYYYYYNNNNNNNNDDDDDDDDVVVVVVVDDDDDDDDVVVVVVVDDDDDDDDAAAAAEEEEEEEEEYYYYYYYYYYYYY

SEQ ID NO: 15 - protein, 3489 aa, Oryza sativa
MMMMMMMMRRRRRRRRRRREEEEEEEEEIIIIIIIIIIIIIIIISSSSSSIIIIIIIIHHHHHHHHHHIIIIIIIIGGGGQQQQQQQQQAAAAAGGGGIIIIIIIIQQQQQQQQQVVVVVVVGGGGNNNNNNNNAAAAACCCCCCWWWWWWWWWWWWWWEEEEEEEEELLLLLLLLYYYYYYYYYYYYCCCCCCLLLLLLLLEEEEEEEEEHHHHHHHHHHGGGGIIIIIIIIEEEEEEEEEPPPPPPPDDDDDDDDGGGGTTTTTTTMMMMMMMMPPPPPPPSSSSSSDDDDDDDDTTTTTTTTTTTTTTVVVVVVVGGGGVVVVVVVAAAAAHHHHHHHHHHDDDDDDDDAAAAAFFFFFFFFFFFNNNNNNNNTTTTTTTFFFFFFFFFFFFFFFFFFFFFFSSSSSSEEEEEEEEETTTTTTTGGGGAAAAAGGGGKKKKKKKKKHHHHHHHHHHVVVVVVVPPPPPPPRRRRRRRRRRRAAAAAIIIIIIIIFFFFFFFFFFFVVVVVVVDDDDDDDDLLLLLLLLEEEEEEEEEPPPPPPPTTTTTTTVVVVVVVIIIIIIIIDDDDDDDDEEEEEEEEEVVVVVVVRRRRRRRRRRRTTTTTTTGGGGSSSSSSYYYYYYYYYYYYRRRRRRRRRRRQQQQQQQQQLLLLLLLLFFFFFFFFFFFHHHHHHHHHHPPPPPPPEEEEEEEEEQQQQQQQQQLLLLLLLLIIIIIIIISSSSSSGGGGKKKKKKKKKEEEEEEEEEDDDDDDDDAAAAAAAAAANNNNNNNNNNNNNNNNFFFFFFFFFFFAAAAARRRRRRRRRRRGGGGHHHHHHHHHHYYYYYYYYYYYYTTTTTTTVVVVVVVGGGGKKKKKKKKKEEEEEEEEEIIIIIIIIVVVVVVVDDDDDDDDLLLLLLLLCCCCCCLLLLLLLLDDDDDDDDRRRRRRRRRRRVVVVVVVRRRRRRRRRRRKKKKKKKKKLLLLLLLLAAAAADDDDDDDDNNNNNNNNCCCCCCTTTTTTTGGGGLLLLLLLLQQQQQQQQQGGGGFFFFFFFFFFFLLLLLLLLVVVVVVVFFFFFFFFFFFNNNNNNNNAAAAAVVVVVVVGGGGGGGGGGGGTTTTTTTGGGGSSSSSSGGGGLLLLLLLLGGGGSSSSSSLLLLLLLLLLLLLLLLLLLLLLLLEEEEEEEEERRRRRRRRRRRLLLLLLLLSSSSSSVVVVVVVDDDDDDDDYYYYYYYYYYYYGGGGKKKKKKKKKKKKKKKKKKSSSSSSKKKKKKKKKLLLLLLLLGGGGFFFFFFFFFFFTTTTTTTIIIIIIIIYYYYYYYYYYYYPPPPPPPSSSSSSPPPPPPPQQQQQQQQQVVVVVVVSSSSSSTTTTTTTAAAAAVVVVVVVVVVVVVVEEEEEEEEEPPPPPPPYYYYYYYYYYYYNNNNNNNNSSSSSSVVVVVVVLLLLLLLLSSSSSSTTTTTTTHHHHHHHHHHSSSSSSLLLLLLLLLLLLLLLLEEEEEEEEEHHHHHHHHHHTTTTTTTDDDDDDDDVVVVVVVAAAAAVVVVVVVLLLLLLLLLLLLLLLLDDDDDDDDNNNNNNNNEEEEEEEEEAAAAAIIIIIIIIYYYYYYYYYYYYDDDDDDDDIIIIIIIICCCCCCRRRRRRRRRRRRRRRRRRRRRRSSSSSSLLLLLLLLDDDDDDDDIIIIIIIIEEEEEEEEERRRRRRRRRRRPPPPPPPTTTTTTTYYYYYYYYYYYYTTTTTTTNNNNNNNNLLLLLLLLNNNNNNNNRRRRRRRRRRRLLLLLLLLIIIIIIIISSSSSSQQQQQQQQQIIIIIIIIIIIIIIIISSSSSSSSSSSSLLLLLLLLTTTTTTTTTTTTTTSSSSSSLLLLLLLLRRRRRRRRRRRFFFFFFFFFFFDDDDDDDDGGGGAAAAAIIIIIIIINNNNNNNNVVVVVVVDDDDDDDDVVVVVVVTTTTTTTEEEEEEEEEFFFFFFFFFFFQQQQQQQQQTTTTTTTNNNNNNNNLLLLLLLLVVVVVVVPPPPPPPYYYYYYYYYYYYPPPPPPPRRRRRRRRRRRIIIIIIIIHHHHHHHHHHFFFFFFFFFFFMMMMMMMMLLLLLLLLSSSSSSSSSSSSYYYYYYYYYYYYAAAAAPPPPPPPVVVVVVVIIIIIIIISSSSSSAAAAAEEEEEEEEEKKKKKKKKKAAAAAYYYYYYYYYYYYHHHHHHHHHHEEEEEEEEEQQQQQQQQQLLLLLLLLSSSSSSVVVVVVVPPPPPPPEEEEEEEEEIIIIIIIITTTTTTTNNNNNNNNAAAAAVVVVVVVFFFFFFFFFFFEEEEEEEEEPPPPPPPSSSSSSSSSSSSMMMMMMMMMMMMMMMMAAAAAKKKKKKKKKCCCCCCDDDDDDDDPPPPPPPRRRRRRRRRRRHHHHHHHHHHGGGGKKKKKKKKKYYYYYYYYYYYYMMMMMMMMAAAAACCCCCCCCCCCCLLLLLLLLMMMMMMMMYYYYYYYYYYYYRRRRRRRRRRRGGGGDDDDDDDDVVVVVVVVVVVVVVPPPPPPPKKKKKKKKKDDDDDDDDVVVVVVVNNNNNNNNAAAAAAAAAAVVVVVVVAAAAATTTTTTTIIIIIIIIKKKKKKKKKTTTTTTTKKKKKKKKKRRRRRRRRRRRTTTTTTTVVVVVVVQQQQQQQQQFFFFFFFFFFFVVVVVVVDDDDDDDDWWWWWWWWWWWWWWCCCCCCPPPPPPPTTTTTTTGGGGFFFFFFFFFFFKKKKKKKKKCCCCCCGGGGIIIIIIIINNNNNNNNYYYYYYYYYYYYQQQQQQQQQPPPPPPPPPPPPPPSSSSSSVVVVVVVVVVVVVVPPPPPPPGGGGGGGGDDDDDDDDLLLLLLLLAAAAAKKKKKKKKKVVVVVVVQQQQQQQQQRRRRRRRRRRRAAAAAVVVVVVVCCCCCCMMMMMMMMIIIIIIIISSSSSSNNNNNNNNNNNNNNNNTTTTTTTAAAAAVVVVVVVAAAAAEEEEEEEEEVVVVVVVFFFFFFFFFFFSSSSSSRRRRRRRRRRRIIIIIIIIDDDDDDDDHHHHHHHHHHKKKKKKKKKFFFFFFFFFFFDDDDDDDDLLLLLLLLMMMMMMMMYYYYYYYYYYYYAAAAAKKKKKKKKKRRRRRRRRRRRAAAAAFFFFFFFFFFFVVVVVVVHHHHHHHHHHWWWWWWWWWWWWWWYYYYYYYYYYYYVVVVVVVGGGGEEEEEEEEEGGGGMMMMMMMMEEEEEEEEEEEEEEEEEEGGGGEEEEEEEEEFFFFFFFFFFFSSSSSSEEEEEEEEEAAAAARRRRRRRRRRREEEEEEEEEDDDDDDDDLLLLLLLLAAAAAAAAAALLLLLLLLEEEEEEEEEKKKKKKKKKDDDDDDDDYYYYYYYYYYYYEEEEEEEEEEEEEEEEEEVVVVVVVGGGGAAAAAEEEEEEEEEGGGGAAAAADDDDDDDDDDDDDDDDEEEEEEEEENNNNNNNNDDDDDDDDDDDDDDDDGGGGEEEEEEEEEDDDDDDDDYYYYYYYYYYYYY

SEQ ID NO: 16 - protein, 3529 aa, Paracentrotus lividus
MMMMMMMMRRRRRRRRRRREEEEEEEEECCCCCCIIIIIIIISSSSSSIIIIIIIIHHHHHHHHHHVVVVVVVGGGGQQQQQQQQQAAAAAGGGGVVVVVVVQQQQQQQQQMMMMMMMMGGGGNNNNNNNNAAAAACCCCCCWWWWWWWWWWWWWWEEEEEEEEELLLLLLLLYYYYYYYYYYYYCCCCCCLLLLLLLLEEEEEEEEEHHHHHHHHHHGGGGIIIIIIIIQQQQQQQQQPPPPPPPDDDDDDDDGGGGQQQQQQQQQMMMMMMMMPPPPPPPSSSSSSDDDDDDDDKKKKKKKKKTTTTTTTIIIIIIIIGGGGGGGGGGGGDDDDDDDDDDDDDDDDSSSSSSFFFFFFFFFFFNNNNNNNNTTTTTTTFFFFFFFFFFFFFFFFFFFFFFSSSSSSEEEEEEEEETTTTTTTGGGGAAAAAGGGGKKKKKKKKKHHHHHHHHHHVVVVVVVPPPPPPPRRRRRRRRRRRAAAAAVVVVVVVFFFFFFFFFFFVVVVVVVDDDDDDDDLLLLLLLLEEEEEEEEEPPPPPPPTTTTTTTVVVVVVVVVVVVVVDDDDDDDDEEEEEEEEEVVVVVVVRRRRRRRRRRRTTTTTTTGGGGTTTTTTTYYYYYYYYYYYYRRRRRRRRRRRQQQQQQQQQLLLLLLLLFFFFFFFFFFFHHHHHHHHHHPPPPPPPEEEEEEEEEQQQQQQQQQLLLLLLLLIIIIIIIITTTTTTTGGGGKKKKKKKKKEEEEEEEEEDDDDDDDDAAAAAAAAAANNNNNNNNNNNNNNNNYYYYYYYYYYYYAAAAARRRRRRRRRRRGGGGHHHHHHHHHHYYYYYYYYYYYYTTTTTTTVVVVVVVGGGGKKKKKKKKKEEEEEEEEELLLLLLLLIIIIIIIIDDDDDDDDIIIIIIIIVVVVVVVLLLLLLLLDDDDDDDDRRRRRRRRRRRIIIIIIIIRRRRRRRRRRRKKKKKKKKKLLLLLLLLAAAAADDDDDDDDQQQQQQQQQCCCCCCTTTTTTTGGGGLLLLLLLLQQQQQQQQQGGGGFFFFFFFFFFFLLLLLLLLIIIIIIIIFFFFFFFFFFFHHHHHHHHHHSSSSSSFFFFFFFFFFFGGGGGGGGGGGGTTTTTTTGGGGSSSSSSGGGGFFFFFFFFFFFSSSSSSSSSSSSLLLLLLLLLLLLLLLLMMMMMMMMEEEEEEEEERRRRRRRRRRRLLLLLLLLSSSSSSVVVVVVVDDDDDDDDYYYYYYYYYYYYGGGGKKKKKKKKKKKKKKKKKKSSSSSSKKKKKKKKKLLLLLLLLEEEEEEEEEFFFFFFFFFFFAAAAAVVVVVVVYYYYYYYYYYYYPPPPPPPAAAAAPPPPPPPQQQQQQQQQIIIIIIIISSSSSSTTTTTTTAAAAAVVVVVVVVVVVVVVEEEEEEEEEPPPPPPPYYYYYYYYYYYYNNNNNNNNSSSSSSIIIIIIIILLLLLLLLTTTTTTTTTTTTTTHHHHHHHHHHTTTTTTTTTTTTTTLLLLLLLLEEEEEEEEEHHHHHHHHHHSSSSSSDDDDDDDDCCCCCCAAAAAFFFFFFFFFFFMMMMMMMMVVVVVVVDDDDDDDDNNNNNNNNEEEEEEEEEAAAAAIIIIIIIIYYYYYYYYYYYYDDDDDDDDIIIIIIIICCCCCCRRRRRRRRRRRRRRRRRRRRRRNNNNNNNNLLLLLLLLDDDDDDDDIIIIIIIIEEEEEEEEERRRRRRRRRRRPPPPPPPTTTTTTTYYYYYYYYYYYYTTTTTTTNNNNNNNNLLLLLLLLNNNNNNNNRRRRRRRRRRRLLLLLLLLIIIIIIIIGGGGQQQQQQQQQIIIIIIIIVVVVVVVSSSSSSSSSSSSIIIIIIIITTTTTTTAAAAASSSSSSLLLLLLLLRRRRRRRRRRRFFFFFFFFFFFDDDDDDDDGGGGAAAAALLLLLLLLNNNNNNNNVVVVVVVDDDDDDDDLLLLLLLLTTTTTTTEEEEEEEEEFFFFFFFFFFFQQQQQQQQQTTTTTTTNNNNNNNNLLLLLLLLVVVVVVVPPPPPPPYYYYYYYYYYYYPPPPPPPRRRRRRRRRRRIIIIIIIIHHHHHHHHHHFFFFFFFFFFFPPPPPPPLLLLLLLLAAAAATTTTTTTYYYYYYYYYYYYAAAAAPPPPPPPVVVVVVVIIIIIIIISSSSSSAAAAAEEEEEEEEEKKKKKKKKKAAAAAYYYYYYYYYYYYHHHHHHHHHHEEEEEEEEEQQQQQQQQQLLLLLLLLTTTTTTTVVVVVVVSSSSSSEEEEEEEEEIIIIIIIITTTTTTTNNNNNNNNAAAAACCCCCCFFFFFFFFFFFEEEEEEEEEPPPPPPPAAAAANNNNNNNNQQQQQQQQQMMMMMMMMVVVVVVVKKKKKKKKKCCCCCCDDDDDDDDPPPPPPPRRRRRRRRRRRHHHHHHHHHHGGGGKKKKKKKKKYYYYYYYYYYYYMMMMMMMMAAAAACCCCCCCCCCCCLLLLLLLLLLLLLLLLYYYYYYYYYYYYRRRRRRRRRRRGGGGDDDDDDDDVVVVVVVVVVVVVVPPPPPPPKKKKKKKKKDDDDDDDDVVVVVVVNNNNNNNNAAAAAAAAAAIIIIIIIIAAAAATTTTTTTIIIIIIIIKKKKKKKKKTTTTTTTKKKKKKKKKRRRRRRRRRRRTTTTTTTIIIIIIIIQQQQQQQQQFFFFFFFFFFFVVVVVVVDDDDDDDDWWWWWWWWWWWWWWCCCCCCPPPPPPPTTTTTTTGGGGFFFFFFFFFFFKKKKKKKKKVVVVVVVGGGGIIIIIIIINNNNNNNNYYYYYYYYYYYYQQQQQQQQQPPPPPPPPPPPPPPTTTTTTTVVVVVVVVVVVVVVPPPPPPPGGGGGGGGDDDDDDDDLLLLLLLLAAAAAKKKKKKKKKVVVVVVVQQQQQQQQQRRRRRRRRRRRAAAAAVVVVVVVCCCCCCMMMMMMMMLLLLLLLLSSSSSSNNNNNNNNTTTTTTTTTTTTTTAAAAAIIIIIIIIAAAAAEEEEEEEEEAAAAAWWWWWWWWWWWWWWAAAAARRRRRRRRRRRLLLLLLLLDDDDDDDDHHHHHHHHHHKKKKKKKKKFFFFFFFFFFFDDDDDDDDLLLLLLLLMMMMMMMMYYYYYYYYYYYYAAAAAKKKKKKKKKRRRRRRRRRRRAAAAAFFFFFFFFFFFVVVVVVVHHHHHHHHHHWWWWWWWWWWWWWWYYYYYYYYYYYYVVVVVVVGGGGEEEEEEEEEGGGGMMMMMMMMEEEEEEEEEEEEEEEEEEGGGGEEEEEEEEEFFFFFFFFFFFSSSSSSEEEEEEEEEAAAAARRRRRRRRRRREEEEEEEEEDDDDDDDDLLLLLLLLAAAAAAAAAALLLLLLLLEEEEEEEEEKKKKKKKKKDDDDDDDDYYYYYYYYYYYYEEEEEEEEEEEEEEEEEEVVVVVVVGGGGVVVVVVVDDDDDDDDSSSSSSAAAAADDDDDDDDAAAAAEEEEEEEEEGGGGEEEEEEEEEEEEEEEEEEEEEEEEEEEEEEEEEEEEGGGGDDDDDDDDEEEEEEEEEYYYYYYYYYYYYY

SEQ ID NO: 17 - protein, 3487 aa, Pisum sativum
MMMMMMMMRRRRRRRRRRREEEEEEEEECCCCCCIIIIIIIISSSSSSIIIIIIIIHHHHHHHHHHIIIIIIIIGGGGQQQQQQQQQAAAAAGGGGIIIIIIIIQQQQQQQQQVVVVVVVGGGGNNNNNNNNAAAAACCCCCCWWWWWWWWWWWWWWEEEEEEEEELLLLLLLLYYYYYYYYYYYYCCCCCCLLLLLLLLEEEEEEEEEHHHHHHHHHHGGGGIIIIIIIIQQQQQQQQQPPPPPPPDDDDDDDDGGGGQQQQQQQQQMMMMMMMMPPPPPPPGGGGDDDDDDDDKKKKKKKKKTTTTTTTVVVVVVVGGGGGGGGGGGGDDDDDDDDDDDDDDDDAAAAAFFFFFFFFFFFNNNNNNNNTTTTTTTFFFFFFFFFFFFFFFFFFFFFFSSSSSSEEEEEEEEETTTTTTTGGGGAAAAAGGGGKKKKKKKKKHHHHHHHHHHVVVVVVVPPPPPPPRRRRRRRRRRRAAAAAVVVVVVVFFFFFFFFFFFVVVVVVVDDDDDDDDLLLLLLLLEEEEEEEEEPPPPPPPTTTTTTTVVVVVVVIIIIIIIIDDDDDDDDEEEEEEEEEVVVVVVVRRRRRRRRRRRTTTTTTTGGGGAAAAAYYYYYYYYYYYYRRRRRRRRRRRQQQQQQQQQLLLLLLLLFFFFFFFFFFFHHHHHHHHHHPPPPPPPEEEEEEEEEQQQQQQQQQLLLLLLLLIIIIIIIISSSSSSGGGGKKKKKKKKKEEEEEEEEEDDDDDDDDAAAAAAAAAANNNNNNNNNNNNNNNNFFFFFFFFFFFAAAAARRRRRRRRRRRGGGGHHHHHHHHHHYYYYYYYYYYYYTTTTTTTIIIIIIIIGGGGKKKKKKKKKEEEEEEEEEIIIIIIIIVVVVVVVDDDDDDDDLLLLLLLLCCCCCCLLLLLLLLDDDDDDDDRRRRRRRRRRRIIIIIIIIRRRRRRRRRRRKKKKKKKKKLLLLLLLLAAAAADDDDDDDDNNNNNNNNCCCCCCTTTTTTTGGGGLLLLLLLLQQQQQQQQQGGGGFFFFFFFFFFFLLLLLLLLVVVVVVVFFFFFFFFFFFNNNNNNNNAAAAAVVVVVVVGGGGGGGGGGGGTTTTTTTGGGGSSSSSSGGGGLLLLLLLLGGGGSSSSSSLLLLLLLLLLLLLLLLLLLLLLLLEEEEEEEEERRRRRRRRRRRLLLLLLLLSSSSSSVVVVVVVDDDDDDDDYYYYYYYYYYYYGGGGKKKKKKKKKKKKKKKKKKSSSSSSKKKKKKKKKLLLLLLLLGGGGFFFFFFFFFFFTTTTTTTVVVVVVVYYYYYYYYYYYYPPPPPPPSSSSSSPPPPPPPQQQQQQQQQVVVVVVVSSSSSSTTTTTTTSSSSSSVVVVVVVVVVVVVVEEEEEEEEEPPPPPPPYYYYYYYYYYYYNNNNNNNNSSSSSSVVVVVVVLLLLLLLLSSSSSSTTTTTTTHHHHHHHHHHSSSSSSLLLLLLLLLLLLLLLLEEEEEEEEEHHHHHHHHHHTTTTTTTDDDDDDDDVVVVVVVAAAAAVVVVVVVLLLLLLLLLLLLLLLLDDDDDDDDNNNNNNNNEEEEEEEEEAAAAAIIIIIIIIYYYYYYYYYYYYDDDDDDDDIIIIIIIICCCCCCRRRRRRRRRRRRRRRRRRRRRRSSSSSSLLLLLLLLDDDDDDDDIIIIIIIIEEEEEEEEERRRRRRRRRRRPPPPPPPTTTTTTTYYYYYYYYYYYYTTTTTTTNNNNNNNNLLLLLLLLNNNNNNNNRRRRRRRRRRRLLLLLLLLVVVVVVVSSSSSSQQQQQQQQQVVVVVVVIIIIIIIISSSSSSSSSSSSLLLLLLLLTTTTTTTAAAAASSSSSSLLLLLLLLRRRRRRRRRRRFFFFFFFFFFFDDDDDDDDGGGGAAAAALLLLLLLLNNNNNNNNVVVVVVVDDDDDDDDVVVVVVVTTTTTTTEEEEEEEEEFFFFFFFFFFFQQQQQQQQQTTTTTTTNNNNNNNNLLLLLLLLVVVVVVVPPPPPPPYYYYYYYYYYYYPPPPPPPRRRRRRRRRRRIIIIIIIIHHHHHHHHHHFFFFFFFFFFFMMMMMMMMLLLLLLLLSSSSSSSSSSSSYYYYYYYYYYYYAAAAAPPPPPPPVVVVVVVIIIIIIIISSSSSSAAAAAEEEEEEEEEKKKKKKKKKAAAAAYYYYYYYYYYYYHHHHHHHHHHEEEEEEEEEQQQQQQQQQLLLLLLLLSSSSSSVVVVVVVAAAAAEEEEEEEEEIIIIIIIITTTTTTTNNNNNNNNSSSSSSAAAAAFFFFFFFFFFFEEEEEEEEEPPPPPPPSSSSSSSSSSSSMMMMMMMMMMMMMMMMAAAAAKKKKKKKKKCCCCCCDDDDDDDDPPPPPPPRRRRRRRRRRRHHHHHHHHHHGGGGKKKKKKKKKYYYYYYYYYYYYMMMMMMMMAAAAACCCCCCCCCCCCLLLLLLLLMMMMMMMMYYYYYYYYYYYYRRRRRRRRRRRGGGGDDDDDDDDVVVVVVVVVVVVVVPPPPPPPKKKKKKKKKDDDDDDDDVVVVVVVNNNNNNNNAAAAAAAAAAVVVVVVVAAAAATTTTTTTIIIIIIIIKKKKKKKKKTTTTTTTKKKKKKKKKRRRRRRRRRRRTTTTTTTIIIIIIIIQQQQQQQQQFFFFFFFFFFFVVVVVVVDDDDDDDDWWWWWWWWWWWWWWCCCCCCPPPPPPPTTTTTTTGGGGFFFFFFFFFFFKKKKKKKKKCCCCCCGGGGIIIIIIIINNNNNNNNYYYYYYYYYYYYQQQQQQQQQPPPPPPPPPPPPPPTTTTTTTVVVVVVVVVVVVVVPPPPPPPGGGGGGGGDDDDDDDDLLLLLLLLAAAAAKKKKKKKKKVVVVVVVQQQQQQQQQRRRRRRRRRRRAAAAAVVVVVVVCCCCCCMMMMMMMMIIIIIIIISSSSSSNNNNNNNNSSSSSSTTTTTTTSSSSSSVVVVVVVAAAAAEEEEEEEEEVVVVVVVFFFFFFFFFFFSSSSSSRRRRRRRRRRRIIIIIIIIDDDDDDDDHHHHHHHHHHKKKKKKKKKFFFFFFFFFFFDDDDDDDDLLLLLLLLMMMMMMMMYYYYYYYYYYYYAAAAAKKKKKKKKKRRRRRRRRRRRAAAAAFFFFFFFFFFFVVVVVVVHHHHHHHHHHWWWWWWWWWWWWWWYYYYYYYYYYYYVVVVVVVGGGGEEEEEEEEEGGGGMMMMMMMMEEEEEEEEEEEEEEEEEEGGGGEEEEEEEEEFFFFFFFFFFFSSSSSSEEEEEEEEEAAAAARRRRRRRRRRREEEEEEEEEDDDDDDDDLLLLLLLLAAAAAAAAAALLLLLLLLEEEEEEEEEKKKKKKKKKDDDDDDDDYYYYYYYYYYYYEEEEEEEEEEEEEEEEEEVVVVVVVGGGGAAAAAEEEEEEEEESSSSSSGGGGDDDDDDDDGGGGDDDDDDDDDDDDDDDDDDDDDDDDGGGGLLLLLLLLGGGGEEEEEEEEEEEEEEEEEEEEEEEEEEEYYYYYYYYYYYYY

SEQ ID NO: 18 - protein, 3505 aa, Pelvetia fastigiata
MMMMMMMMRRRRRRRRRRREEEEEEEEECCCCCCIIIIIIIISSSSSSIIIIIIIIHHHHHHHHHHIIIIIIIIGGGGQQQQQQQQQAAAAAGGGGIIIIIIIIQQQQQQQQQVVVVVVVGGGGNNNNNNNNAAAAACCCCCCWWWWWWWWWWWWWWEEEEEEEEELLLLLLLLYYYYYYYYYYYYCCCCCCLLLLLLLLEEEEEEEEEHHHHHHHHHHGGGGIIIIIIIIQQQQQQQQQPPPPPPPNNNNNNNNGGGGQQQQQQQQQMMMMMMMMPPPPPPPAAAAADDDDDDDDNNNNNNNNTTTTTTTTTTTTTTGGGGGGGGGGGGDDDDDDDDDDDDDDDDAAAAAFFFFFFFFFFFNNNNNNNNTTTTTTTFFFFFFFFFFFFFFFFFFFFFFSSSSSSEEEEEEEEETTTTTTTGGGGAAAAAGGGGKKKKKKKKKHHHHHHHHHHVVVVVVVPPPPPPPRRRRRRRRRRRAAAAAVVVVVVVYYYYYYYYYYYYVVVVVVVDDDDDDDDLLLLLLLLEEEEEEEEEPPPPPPPTTTTTTTVVVVVVVCCCCCCDDDDDDDDEEEEEEEEEVVVVVVVRRRRRRRRRRRTTTTTTTGGGGSSSSSSYYYYYYYYYYYYRRRRRRRRRRRQQQQQQQQQLLLLLLLLYYYYYYYYYYYYHHHHHHHHHHPPPPPPPEEEEEEEEEQQQQQQQQQIIIIIIIIIIIIIIIISSSSSSGGGGKKKKKKKKKEEEEEEEEEDDDDDDDDAAAAAAAAAANNNNNNNNNNNNNNNNYYYYYYYYYYYYAAAAARRRRRRRRRRRGGGGHHHHHHHHHHYYYYYYYYYYYYTTTTTTTIIIIIIIIGGGGKKKKKKKKKEEEEEEEEEIIIIIIIIVVVVVVVDDDDDDDDIIIIIIIIVVVVVVVLLLLLLLLDDDDDDDDRRRRRRRRRRRIIIIIIIIRRRRRRRRRRRKKKKKKKKKLLLLLLLLSSSSSSDDDDDDDDNNNNNNNNCCCCCCTTTTTTTGGGGLLLLLLLLQQQQQQQQQGGGGFFFFFFFFFFFLLLLLLLLVVVVVVVFFFFFFFFFFFHHHHHHHHHHAAAAATTTTTTTGGGGGGGGGGGGTTTTTTTGGGGSSSSSSGGGGLLLLLLLLGGGGSSSSSSLLLLLLLLLLLLLLLLLLLLLLLLEEEEEEEEERRRRRRRRRRRLLLLLLLLSSSSSSVVVVVVVDDDDDDDDYYYYYYYYYYYYGGGGRRRRRRRRRRRKKKKKKKKKSSSSSSKKKKKKKKKLLLLLLLLSSSSSSFFFFFFFFFFFAAAAAIIIIIIIITTTTTTTPPPPPPPAAAAAPPPPPPPQQQQQQQQQVVVVVVVAAAAATTTTTTTAAAAAVVVVVVVVVVVVVVEEEEEEEEEPPPPPPPYYYYYYYYYYYYNNNNNNNNSSSSSSVVVVVVVLLLLLLLLSSSSSSTTTTTTTHHHHHHHHHHAAAAALLLLLLLLLLLLLLLLEEEEEEEEEHHHHHHHHHHTTTTTTTDDDDDDDDCCCCCCTTTTTTTFFFFFFFFFFFCCCCCCLLLLLLLLDDDDDDDDNNNNNNNNEEEEEEEEEAAAAALLLLLLLLYYYYYYYYYYYYDDDDDDDDVVVVVVVCCCCCCRRRRRRRRRRRRRRRRRRRRRRNNNNNNNNLLLLLLLLDDDDDDDDIIIIIIIIEEEEEEEEERRRRRRRRRRRPPPPPPPTTTTTTTYYYYYYYYYYYYTTTTTTTNNNNNNNNLLLLLLLLNNNNNNNNRRRRRRRRRRRLLLLLLLLVVVVVVVAAAAAQQQQQQQQQVVVVVVVIIIIIIIISSSSSSSSSSSSLLLLLLLLTTTTTTTAAAAASSSSSSLLLLLLLLRRRRRRRRRRRFFFFFFFFFFFDDDDDDDDGGGGAAAAALLLLLLLLNNNNNNNNVVVVVVVDDDDDDDDVVVVVVVTTTTTTTEEEEEEEEEFFFFFFFFFFFQQQQQQQQQTTTTTTTNNNNNNNNLLLLLLLLVVVVVVVPPPPPPPYYYYYYYYYYYYPPPPPPPRRRRRRRRRRRIIIIIIIIHHHHHHHHHHFFFFFFFFFFFMMMMMMMMLLLLLLLLTTTTTTTSSSSSSYYYYYYYYYYYYAAAAAPPPPPPPIIIIIIIIIIIIIIIISSSSSSAAAAAEEEEEEEEEKKKKKKKKKAAAAAYYYYYYYYYYYYHHHHHHHHHHEEEEEEEEEQQQQQQQQQLLLLLLLLSSSSSSVVVVVVVAAAAAEEEEEEEEEIIIIIIIITTTTTTTNNNNNNNNSSSSSSVVVVVVVFFFFFFFFFFFEEEEEEEEEPPPPPPPAAAAAGGGGMMMMMMMMMMMMMMMMTTTTTTTKKKKKKKKKCCCCCCDDDDDDDDPPPPPPPRRRRRRRRRRRHHHHHHHHHHGGGGKKKKKKKKKYYYYYYYYYYYYMMMMMMMMAAAAACCCCCCCCCCCCLLLLLLLLMMMMMMMMYYYYYYYYYYYYRRRRRRRRRRRGGGGDDDDDDDDVVVVVVVVVVVVVVPPPPPPPKKKKKKKKKDDDDDDDDVVVVVVVNNNNNNNNAAAAAAAAAAVVVVVVVAAAAATTTTTTTIIIIIIIIKKKKKKKKKTTTTTTTKKKKKKKKKRRRRRRRRRRRTTTTTTTIIIIIIIIQQQQQQQQQFFFFFFFFFFFVVVVVVVDDDDDDDDWWWWWWWWWWWWWWCCCCCCPPPPPPPTTTTTTTGGGGFFFFFFFFFFFKKKKKKKKKCCCCCCGGGGIIIIIIIINNNNNNNNYYYYYYYYYYYYQQQQQQQQQPPPPPPPPPPPPPPTTTTTTTAAAAAVVVVVVVPPPPPPPGGGGGGGGDDDDDDDDLLLLLLLLAAAAARRRRRRRRRRRVVVVVVVQQQQQQQQQRRRRRRRRRRRAAAAAVVVVVVVCCCCCCMMMMMMMMVVVVVVVAAAAANNNNNNNNTTTTTTTTTTTTTTAAAAAIIIIIIIIAAAAAEEEEEEEEEAAAAALLLLLLLLSSSSSSRRRRRRRRRRRIIIIIIIIDDDDDDDDHHHHHHHHHHKKKKKKKKKFFFFFFFFFFFDDDDDDDDLLLLLLLLMMMMMMMMYYYYYYYYYYYYAAAAAKKKKKKKKKRRRRRRRRRRRAAAAAFFFFFFFFFFFVVVVVVVHHHHHHHHHHWWWWWWWWWWWWWWYYYYYYYYYYYYVVVVVVVGGGGEEEEEEEEEGGGGMMMMMMMMEEEEEEEEEEEEEEEEEEGGGGEEEEEEEEEFFFFFFFFFFFSSSSSSEEEEEEEEEAAAAARRRRRRRRRRREEEEEEEEEDDDDDDDDLLLLLLLLVVVVVVVAAAAALLLLLLLLEEEEEEEEEKKKKKKKKKDDDDDDDDYYYYYYYYYYYYEEEEEEEEEEEEEEEEEEVVVVVVVGGGGAAAAAEEEEEEEEETTTTTTTAAAAADDDDDDDDGGGGDDDDDDDDGGGGEEEEEEEEEEEEEEEEEEEEEEEEEEEEEEEEEEEEFFFFFFFFFFFGGGGEEEEEEEEEEEEEEEEEEYYYYYYYYYYYYY

SEQ ID NO: 19 - protein, 3544 aa, Pneumocystis carinii
MMMMMMMMRRRRRRRRRRREEEEEEEEEVVVVVVVIIIIIIIISSSSSSIIIIIIIIHHHHHHHHHHVVVVVVVGGGGQQQQQQQQQAAAAAGGGGTTTTTTTQQQQQQQQQIIIIIIIIGGGGNNNNNNNNAAAAACCCCCCWWWWWWWWWWWWWWEEEEEEEEELLLLLLLLYYYYYYYYYYYYCCCCCCLLLLLLLLEEEEEEEEEHHHHHHHHHHGGGGIIIIIIIIEEEEEEEEEPPPPPPPDDDDDDDDGGGGRRRRRRRRRRRLLLLLLLLSSSSSSPPPPPPPEEEEEEEEEKKKKKKKKKTTTTTTTTTTTTTTKKKKKKKKKPPPPPPPLLLLLLLLDDDDDDDDDDDDDDDDGGGGFFFFFFFFFFFSSSSSSTTTTTTTFFFFFFFFFFFFFFFFFFFFFFSSSSSSEEEEEEEEETTTTTTTGGGGSSSSSSGGGGKKKKKKKKKYYYYYYYYYYYYVVVVVVVPPPPPPPRRRRRRRRRRRSSSSSSIIIIIIIIYYYYYYYYYYYYVVVVVVVDDDDDDDDLLLLLLLLEEEEEEEEEPPPPPPPNNNNNNNNVVVVVVVIIIIIIIIDDDDDDDDQQQQQQQQQVVVVVVVRRRRRRRRRRRTTTTTTTGGGGTTTTTTTYYYYYYYYYYYYRRRRRRRRRRRHHHHHHHHHHLLLLLLLLFFFFFFFFFFFHHHHHHHHHHPPPPPPPEEEEEEEEEQQQQQQQQQLLLLLLLLIIIIIIIITTTTTTTGGGGKKKKKKKKKEEEEEEEEEDDDDDDDDAAAAAAAAAANNNNNNNNNNNNNNNNYYYYYYYYYYYYAAAAARRRRRRRRRRRGGGGHHHHHHHHHHYYYYYYYYYYYYTTTTTTTVVVVVVVGGGGKKKKKKKKKEEEEEEEEELLLLLLLLIIIIIIIIDDDDDDDDHHHHHHHHHHVVVVVVVLLLLLLLLDDDDDDDDRRRRRRRRRRRIIIIIIIIRRRRRRRRRRRRRRRRRRRRRRVVVVVVVAAAAADDDDDDDDNNNNNNNNCCCCCCTTTTTTTGGGGLLLLLLLLQQQQQQQQQGGGGFFFFFFFFFFFLLLLLLLLVVVVVVVFFFFFFFFFFFHHHHHHHHHHSSSSSSFFFFFFFFFFFGGGGGGGGGGGGTTTTTTTGGGGSSSSSSGGGGFFFFFFFFFFFGGGGAAAAALLLLLLLLLLLLLLLLLLLLLLLLEEEEEEEEERRRRRRRRRRRLLLLLLLLSSSSSSVVVVVVVDDDDDDDDYYYYYYYYYYYYGGGGKKKKKKKKKKKKKKKKKKSSSSSSKKKKKKKKKLLLLLLLLEEEEEEEEEFFFFFFFFFFFSSSSSSVVVVVVVYYYYYYYYYYYYPPPPPPPAAAAAPPPPPPPQQQQQQQQQVVVVVVVSSSSSSTTTTTTTSSSSSSVVVVVVVVVVVVVVEEEEEEEEEPPPPPPPYYYYYYYYYYYYNNNNNNNNSSSSSSIIIIIIIILLLLLLLLTTTTTTTTTTTTTTHHHHHHHHHHTTTTTTTTTTTTTTLLLLLLLLEEEEEEEEEHHHHHHHHHHSSSSSSDDDDDDDDCCCCCCSSSSSSFFFFFFFFFFFMMMMMMMMVVVVVVVDDDDDDDDNNNNNNNNEEEEEEEEEAAAAAIIIIIIIIYYYYYYYYYYYYDDDDDDDDIIIIIIIICCCCCCRRRRRRRRRRRRRRRRRRRRRRNNNNNNNNLLLLLLLLDDDDDDDDIIIIIIIIEEEEEEEEERRRRRRRRRRRPPPPPPPGGGGYYYYYYYYYYYYEEEEEEEEENNNNNNNNLLLLLLLLNNNNNNNNRRRRRRRRRRRLLLLLLLLIIIIIIIIAAAAAQQQQQQQQQVVVVVVVVVVVVVVSSSSSSSSSSSSIIIIIIIITTTTTTTAAAAASSSSSSLLLLLLLLRRRRRRRRRRRFFFFFFFFFFFDDDDDDDDGGGGSSSSSSLLLLLLLLNNNNNNNNVVVVVVVDDDDDDDDLLLLLLLLNNNNNNNNEEEEEEEEEFFFFFFFFFFFQQQQQQQQQTTTTTTTNNNNNNNNLLLLLLLLVVVVVVVPPPPPPPYYYYYYYYYYYYPPPPPPPRRRRRRRRRRRIIIIIIIIHHHHHHHHHHFFFFFFFFFFFPPPPPPPLLLLLLLLVVVVVVVTTTTTTTYYYYYYYYYYYYAAAAAPPPPPPPLLLLLLLLIIIIIIIISSSSSSAAAAAAAAAAKKKKKKKKKAAAAAHHHHHHHHHHHHHHHHHHHHEEEEEEEEEAAAAANNNNNNNNSSSSSSVVVVVVVAAAAAEEEEEEEEEIIIIIIIITTTTTTTNNNNNNNNAAAAACCCCCCFFFFFFFFFFFEEEEEEEEEPPPPPPPNNNNNNNNNNNNNNNNQQQQQQQQQMMMMMMMMVVVVVVVKKKKKKKKKCCCCCCDDDDDDDDPPPPPPPRRRRRRRRRRRNNNNNNNNGGGGKKKKKKKKKYYYYYYYYYYYYMMMMMMMMAAAAATTTTTTTCCCCCCLLLLLLLLLLLLLLLLYYYYYYYYYYYYRRRRRRRRRRRGGGGDDDDDDDDIIIIIIIIVVVVVVVTTTTTTTKKKKKKKKKDDDDDDDDVVVVVVVNNNNNNNNCCCCCCAAAAAVVVVVVVSSSSSSSSSSSSIIIIIIIIRRRRRRRRRRRTTTTTTTKKKKKKKKKRRRRRRRRRRRTTTTTTTIIIIIIIIQQQQQQQQQFFFFFFFFFFFVVVVVVVDDDDDDDDWWWWWWWWWWWWWWCCCCCCPPPPPPPTTTTTTTGGGGFFFFFFFFFFFKKKKKKKKKLLLLLLLLGGGGVVVVVVVCCCCCCYYYYYYYYYYYYQQQQQQQQQPPPPPPPPPPPPPPQQQQQQQQQYYYYYYYYYYYYVVVVVVVPPPPPPPNNNNNNNNGGGGDDDDDDDDLLLLLLLLAAAAAKKKKKKKKKVVVVVVVNNNNNNNNRRRRRRRRRRRAAAAAVVVVVVVCCCCCCMMMMMMMMLLLLLLLLSSSSSSNNNNNNNNTTTTTTTTTTTTTTSSSSSSIIIIIIIIAAAAAEEEEEEEEEAAAAAWWWWWWWWWWWWWWSSSSSSRRRRRRRRRRRLLLLLLLLDDDDDDDDHHHHHHHHHHKKKKKKKKKFFFFFFFFFFFDDDDDDDDLLLLLLLLMMMMMMMMYYYYYYYYYYYYSSSSSSKKKKKKKKKRRRRRRRRRRRAAAAAFFFFFFFFFFFVVVVVVVHHHHHHHHHHWWWWWWWWWWWWWWYYYYYYYYYYYYVVVVVVVGGGGEEEEEEEEEGGGGMMMMMMMMEEEEEEEEEEEEEEEEEEGGGGEEEEEEEEEFFFFFFFFFFFSSSSSSEEEEEEEEEAAAAARRRRRRRRRRREEEEEEEEEDDDDDDDDLLLLLLLLAAAAAAAAAALLLLLLLLEEEEEEEEEKKKKKKKKKDDDDDDDDYYYYYYYYYYYYEEEEEEEEEEEEEEEEEEVVVVVVVGGGGQQQQQQQQQDDDDDDDDSSSSSSIIIIIIIIEEEEEEEEEGGGGEEEEEEEEEIIIIIIIIMMMMMMMMEEEEEEEEEEEEEEEEEEEEEEEEEEEYYYYYYYYYYYYY

SEQ ID NO: 20 - protein, 3593 aa, Schizosaccharomyces pombe
MMMMMMMMRRRRRRRRRRREEEEEEEEEVVVVVVVIIIIIIIISSSSSSVVVVVVVHHHHHHHHHHVVVVVVVGGGGQQQQQQQQQAAAAAGGGGVVVVVVVQQQQQQQQQIIIIIIIIGGGGNNNNNNNNAAAAACCCCCCWWWWWWWWWWWWWWEEEEEEEEELLLLLLLLYYYYYYYYYYYYCCCCCCLLLLLLLLEEEEEEEEEHHHHHHHHHHGGGGIIIIIIIIGGGGPPPPPPPDDDDDDDDGGGGFFFFFFFFFFFPPPPPPPTTTTTTTEEEEEEEEENNNNNNNNSSSSSSEEEEEEEEEVVVVVVVHHHHHHHHHHKKKKKKKKKNNNNNNNNNNNNNNNNSSSSSSYYYYYYYYYYYYLLLLLLLLNNNNNNNNDDDDDDDDGGGGFFFFFFFFFFFGGGGTTTTTTTFFFFFFFFFFFFFFFFFFFFFFSSSSSSEEEEEEEEETTTTTTTGGGGQQQQQQQQQGGGGKKKKKKKKKFFFFFFFFFFFVVVVVVVPPPPPPPRRRRRRRRRRRSSSSSSIIIIIIIIYYYYYYYYYYYYVVVVVVVDDDDDDDDLLLLLLLLEEEEEEEEEPPPPPPPNNNNNNNNVVVVVVVIIIIIIIIDDDDDDDDQQQQQQQQQVVVVVVVRRRRRRRRRRRTTTTTTTGGGGPPPPPPPYYYYYYYYYYYYKKKKKKKKKDDDDDDDDLLLLLLLLFFFFFFFFFFFHHHHHHHHHHPPPPPPPEEEEEEEEEQQQQQQQQQMMMMMMMMVVVVVVVTTTTTTTGGGGKKKKKKKKKEEEEEEEEEDDDDDDDDAAAAASSSSSSNNNNNNNNNNNNNNNNYYYYYYYYYYYYAAAAARRRRRRRRRRRGGGGHHHHHHHHHHYYYYYYYYYYYYTTTTTTTVVVVVVVGGGGKKKKKKKKKEEEEEEEEEMMMMMMMMIIIIIIIIDDDDDDDDSSSSSSVVVVVVVLLLLLLLLEEEEEEEEERRRRRRRRRRRIIIIIIIIRRRRRRRRRRRRRRRRRRRRRRMMMMMMMMAAAAADDDDDDDDNNNNNNNNCCCCCCSSSSSSGGGGLLLLLLLLQQQQQQQQQGGGGFFFFFFFFFFFLLLLLLLLVVVVVVVFFFFFFFFFFFHHHHHHHHHHSSSSSSFFFFFFFFFFFGGGGGGGGGGGGTTTTTTTGGGGSSSSSSGGGGLLLLLLLLGGGGAAAAALLLLLLLLLLLLLLLLLLLLLLLLEEEEEEEEERRRRRRRRRRRLLLLLLLLNNNNNNNNMMMMMMMMEEEEEEEEEYYYYYYYYYYYYGGGGKKKKKKKKKKKKKKKKKKSSSSSSNNNNNNNNLLLLLLLLQQQQQQQQQFFFFFFFFFFFSSSSSSVVVVVVVYYYYYYYYYYYYPPPPPPPAAAAAPPPPPPPQQQQQQQQQVVVVVVVSSSSSSTTTTTTTSSSSSSVVVVVVVVVVVVVVEEEEEEEEEPPPPPPPYYYYYYYYYYYYNNNNNNNNSSSSSSVVVVVVVLLLLLLLLTTTTTTTTTTTTTTHHHHHHHHHHAAAAATTTTTTTLLLLLLLLDDDDDDDDNNNNNNNNSSSSSSDDDDDDDDCCCCCCTTTTTTTFFFFFFFFFFFMMMMMMMMVVVVVVVDDDDDDDDNNNNNNNNEEEEEEEEEAAAAACCCCCCYYYYYYYYYYYYDDDDDDDDIIIIIIIICCCCCCRRRRRRRRRRRRRRRRRRRRRRNNNNNNNNLLLLLLLLDDDDDDDDIIIIIIIIEEEEEEEEERRRRRRRRRRRPPPPPPPTTTTTTTYYYYYYYYYYYYEEEEEEEEENNNNNNNNLLLLLLLLNNNNNNNNRRRRRRRRRRRLLLLLLLLIIIIIIIIAAAAAQQQQQQQQQVVVVVVVVVVVVVVSSSSSSSSSSSSIIIIIIIITTTTTTTAAAAASSSSSSLLLLLLLLRRRRRRRRRRRFFFFFFFFFFFAAAAAGGGGSSSSSSLLLLLLLLNNNNNNNNVVVVVVVDDDDDDDDLLLLLLLLNNNNNNNNEEEEEEEEEFFFFFFFFFFFQQQQQQQQQTTTTTTTNNNNNNNNLLLLLLLLVVVVVVVPPPPPPPYYYYYYYYYYYYPPPPPPPRRRRRRRRRRRIIIIIIIIHHHHHHHHHHFFFFFFFFFFFPPPPPPPLLLLLLLLVVVVVVVTTTTTTTYYYYYYYYYYYYSSSSSSPPPPPPPIIIIIIIIVVVVVVVSSSSSSAAAAAAAAAAKKKKKKKKKAAAAAFFFFFFFFFFFHHHHHHHHHHEEEEEEEEESSSSSSNNNNNNNNSSSSSSVVVVVVVQQQQQQQQQEEEEEEEEEIIIIIIIITTTTTTTNNNNNNNNQQQQQQQQQCCCCCCFFFFFFFFFFFEEEEEEEEEPPPPPPPYYYYYYYYYYYYNNNNNNNNQQQQQQQQQMMMMMMMMVVVVVVVKKKKKKKKKCCCCCCDDDDDDDDPPPPPPPRRRRRRRRRRRTTTTTTTGGGGRRRRRRRRRRRYYYYYYYYYYYYMMMMMMMMAAAAATTTTTTTCCCCCCLLLLLLLLLLLLLLLLYYYYYYYYYYYYRRRRRRRRRRRGGGGDDDDDDDDVVVVVVVIIIIIIIIPPPPPPPRRRRRRRRRRRDDDDDDDDVVVVVVVQQQQQQQQQAAAAAAAAAAVVVVVVVTTTTTTTSSSSSSIIIIIIIIKKKKKKKKKSSSSSSRRRRRRRRRRRRRRRRRRRRRRTTTTTTTIIIIIIIIQQQQQQQQQFFFFFFFFFFFVVVVVVVDDDDDDDDWWWWWWWWWWWWWWCCCCCCPPPPPPPTTTTTTTGGGGFFFFFFFFFFFKKKKKKKKKIIIIIIIIGGGGIIIIIIIICCCCCCYYYYYYYYYYYYEEEEEEEEEPPPPPPPPPPPPPPQQQQQQQQQHHHHHHHHHHVVVVVVVPPPPPPPGGGGSSSSSSGGGGIIIIIIIIAAAAAKKKKKKKKKVVVVVVVNNNNNNNNRRRRRRRRRRRAAAAAVVVVVVVCCCCCCMMMMMMMMLLLLLLLLSSSSSSNNNNNNNNTTTTTTTTTTTTTTSSSSSSIIIIIIIIAAAAAEEEEEEEEEAAAAAWWWWWWWWWWWWWWSSSSSSRRRRRRRRRRRLLLLLLLLDDDDDDDDHHHHHHHHHHKKKKKKKKKFFFFFFFFFFFDDDDDDDDLLLLLLLLMMMMMMMMYYYYYYYYYYYYSSSSSSKKKKKKKKKRRRRRRRRRRRAAAAAFFFFFFFFFFFVVVVVVVHHHHHHHHHHWWWWWWWWWWWWWWYYYYYYYYYYYYVVVVVVVGGGGEEEEEEEEEGGGGMMMMMMMMEEEEEEEEEEEEEEEEEEGGGGEEEEEEEEEFFFFFFFFFFFSSSSSSEEEEEEEEEAAAAARRRRRRRRRRREEEEEEEEEDDDDDDDDLLLLLLLLAAAAAAAAAALLLLLLLLEEEEEEEEERRRRRRRRRRRDDDDDDDDYYYYYYYYYYYYEEEEEEEEEEEEEEEEEEVVVVVVVGGGGQQQQQQQQQDDDDDDDDSSSSSSMMMMMMMMDDDDDDDDNNNNNNNNEEEEEEEEEMMMMMMMMYYYYYYYYYYYYEEEEEEEEEAAAAADDDDDDDDEEEEEEEEEEEEEEEEEEYYYYYYYYYYYYY

SEQ ID NO: 21 - protein, 3447 aa, Stylonychia lemnae
MMMMMMMMRRRRRRRRRRREEEEEEEEEVVVVVVVIIIIIIIISSSSSSIIIIIIIIHHHHHHHHHHVVVVVVVGGGGQQQQQQQQQAAAAAGGGGIIIIIIIIQQQQQQQQQIIIIIIIIGGGGNNNNNNNNAAAAACCCCCCWWWWWWWWWWWWWWEEEEEEEEELLLLLLLLFFFFFFFFFFFCCCCCCLLLLLLLLEEEEEEEEEHHHHHHHHHHGGGGIIIIIIIIQQQQQQQQQPPPPPPPDDDDDDDDGGGGQQQQQQQQQMMMMMMMMPPPPPPPSSSSSSDDDDDDDDKKKKKKKKKTTTTTTTIIIIIIIIGGGGGGGGGGGGDDDDDDDDDDDDDDDDAAAAAFFFFFFFFFFFNNNNNNNNTTTTTTTFFFFFFFFFFFFFFFFFFFFFFSSSSSSEEEEEEEEETTTTTTTGGGGAAAAAEEEEEEEEEKKKKKKKKKHHHHHHHHHHVVVVVVVPPPPPPPRRRRRRRRRRRCCCCCCVVVVVVVFFFFFFFFFFFLLLLLLLLDDDDDDDDLLLLLLLLEEEEEEEEEPPPPPPPTTTTTTTVVVVVVVIIIIIIIIDDDDDDDDEEEEEEEEEVVVVVVVRRRRRRRRRRRTTTTTTTGGGGTTTTTTTYYYYYYYYYYYYRRRRRRRRRRRQQQQQQQQQLLLLLLLLFFFFFFFFFFFHHHHHHHHHHPPPPPPPEEEEEEEEEQQQQQQQQQLLLLLLLLIIIIIIIISSSSSSGGGGKKKKKKKKKEEEEEEEEEDDDDDDDDAAAAAAAAAANNNNNNNNNNNNNNNNFFFFFFFFFFFAAAAARRRRRRRRRRRGGGGHHHHHHHHHHYYYYYYYYYYYYTTTTTTTIIIIIIIIGGGGKKKKKKKKKEEEEEEEEEIIIIIIIIVVVVVVVDDDDDDDDLLLLLLLLCCCCCCLLLLLLLLDDDDDDDDRRRRRRRRRRRIIIIIIIIRRRRRRRRRRRKKKKKKKKKLLLLLLLLAAAAADDDDDDDDQQQQQQQQQCCCCCCTTTTTTTGGGGLLLLLLLLQQQQQQQQQGGGGFFFFFFFFFFFLLLLLLLLVVVVVVVFFFFFFFFFFFNNNNNNNNSSSSSSVVVVVVVGGGGGGGGGGGGTTTTTTTGGGGSSSSSSGGGGLLLLLLLLGGGGSSSSSSLLLLLLLLLLLLLLLLLLLLLLLLEEEEEEEEERRRRRRRRRRRLLLLLLLLSSSSSSVVVVVVVDDDDDDDDYYYYYYYYYYYYGGGGKKKKKKKKKKKKKKKKKKSSSSSSKKKKKKKKKLLLLLLLLGGGGFFFFFFFFFFFTTTTTTTVVVVVVVYYYYYYYYYYYYPPPPPPPSSSSSSPPPPPPPQQQQQQQQQVVVVVVVSSSSSSTTTTTTTAAAAAVVVVVVVVVVVVVVEEEEEEEEEPPPPPPPYYYYYYYYYYYYNNNNNNNNSSSSSSVVVVVVVLLLLLLLLSSSSSSTTTTTTTHHHHHHHHHHSSSSSSLLLLLLLLLLLLLLLLEEEEEEEEEHHHHHHHHHHTTTTTTTDDDDDDDDVVVVVVVAAAAAVVVVVVVMMMMMMMMLLLLLLLLDDDDDDDDNNNNNNNNEEEEEEEEEAAAAAVVVVVVVYYYYYYYYYYYYDDDDDDDDIIIIIIIICCCCCCRRRRRRRRRRRRRRRRRRRRRRNNNNNNNNLLLLLLLLDDDDDDDDIIIIIIIIEEEEEEEEERRRRRRRRRRRPPPPPPPTTTTTTTYYYYYYYYYYYYTTTTTTTNNNNNNNNLLLLLLLLNNNNNNNNRRRRRRRRRRRLLLLLLLLIIIIIIIIAAAAAQQQQQQQQQVVVVVVVIIIIIIIISSSSSSSSSSSSLLLLLLLLTTTTTTTAAAAASSSSSSLLLLLLLLRRRRRRRRRRRFFFFFFFFFFFDDDDDDDDGGGGAAAAALLLLLLLLNNNNNNNNVVVVVVVDDDDDDDDVVVVVVVTTTTTTTEEEEEEEEEFFFFFFFFFFFQQQQQQQQQTTTTTTTNNNNNNNNLLLLLLLLVVVVVVVPPPPPPPYYYYYYYYYYYYPPPPPPPSSSSSSVVVVVVVIIIIIIIIIIIIIIIIRRRRRRRRRRRPPPPPPPSSSSSSTTTTTTTPPPPPPPAAAAAEEEEEEEEEKKKKKKKKKAAAAAYYYYYYYYYYYYHHHHHHHHHHEEEEEEEEEQQQQQQQQQLLLLLLLLSSSSSSVVVVVVVAAAAAEEEEEEEEEIIIIIIIITTTTTTTNNNNNNNNSSSSSSAAAAAFFFFFFFFFFFEEEEEEEEEPPPPPPPAAAAASSSSSSMMMMMMMMMMMMMMMMAAAAAKKKKKKKKKCCCCCCDDDDDDDDPPPPPPPRRRRRRRRRRRHHHHHHHHHHGGGGKKKKKKKKKYYYYYYYYYYYYMMMMMMMMAAAAACCCCCCCCCCCCLLLLLLLLMMMMMMMMYYYYYYYYYYYYRRRRRRRRRRRGGGGDDDDDDDDVVVVVVVVVVVVVVPPPPPPPKKKKKKKKKDDDDDDDDVVVVVVVNNNNNNNNAAAAAAAAAAVVVVVVVAAAAATTTTTTTIIIIIIIIKKKKKKKKKTTTTTTTKKKKKKKKKRRRRRRRRRRRTTTTTTTIIIIIIIIQQQQQQQQQFFFFFFFFFFFVVVVVVVDDDDDDDDWWWWWWWWWWWWWWCCCCCCPPPPPPPTTTTTTTGGGGFFFFFFFFFFFKKKKKKKKKCCCCCCGGGGIIIIIIIINNNNNNNNYYYYYYYYYYYYQQQQQQQQQPPPPPPPPPPPPPPTTTTTTTVVVVVVVVVVVVVVPPPPPPPSSSSSSGGGGDDDDDDDDPPPPPPPAAAAAKKKKKKKKKVVVVVVVMMMMMMMMRRRRRRRRRRRAAAAAVVVVVVVCCCCCCMMMMMMMMIIIIIIIISSSSSSNNNNNNNNSSSSSSTTTTTTTAAAAAIIIIIIIIAAAAAEEEEEEEEEVVVVVVVFFFFFFFFFFFSSSSSSRRRRRRRRRRRIIIIIIIIDDDDDDDDHHHHHHHHHHKKKKKKKKKFFFFFFFFFFFDDDDDDDDLLLLLLLLMMMMMMMMYYYYYYYYYYYYAAAAAKKKKKKKKKRRRRRRRRRRRAAAAAFFFFFFFFFFFVVVVVVVHHHHHHHHHHWWWWWWWWWWWWWWYYYYYYYYYYYYVVVVVVVGGGGEEEEEEEEEGGGGMMMMMMMMEEEEEEEEEEEEEEEEEEGGGGEEEEEEEEEFFFFFFFFFFFSSSSSSEEEEEEEEEVVVVVVVRRRRRRRRRRREEEEEEEEEDDDDDDDDLLLLLLLLAAAAAAAAAALLLLLLLLEEEEEEEEEKKKKKKKKKDDDDDDDDYYYYYYYYYYYYEEEEEEEEEEEEEEEEEEVVVVVVVGGGGIIIIIIIIEEEEEEEEEIIIIIIIIVVVVVVVEEEEEEEEEGGGGEEEEEEEEEGGGGEEEEEEEEEEEEEEEEEEEEEEEEEEEGGGGMMMMMMMMEEEEEEEEEE

SEQ ID NO: 22 - protein, 3481 aa, Volvox carteri
MMMMMMMMRRRRRRRRRRREEEEEEEEEVVVVVVVIIIIIIIISSSSSSIIIIIIIIHHHHHHHHHHIIIIIIIIGGGGQQQQQQQQQAAAAAGGGGIIIIIIIIQQQQQQQQQVVVVVVVGGGGNNNNNNNNAAAAACCCCCCWWWWWWWWWWWWWWEEEEEEEEELLLLLLLLYYYYYYYYYYYYCCCCCCLLLLLLLLEEEEEEEEEHHHHHHHHHHGGGGIIIIIIIIQQQQQQQQQPPPPPPPDDDDDDDDGGGGQQQQQQQQQMMMMMMMMPPPPPPPSSSSSSDDDDDDDDKKKKKKKKKTTTTTTTIIIIIIIIGGGGGGGGGGGGDDDDDDDDDDDDDDDDAAAAAFFFFFFFFFFFNNNNNNNNTTTTTTTFFFFFFFFFFFFFFFFFFFFFFSSSSSSEEEEEEEEETTTTTTTGGGGAAAAAGGGGKKKKKKKKKHHHHHHHHHHVVVVVVVPPPPPPPRRRRRRRRRRRCCCCCCIIIIIIIIFFFFFFFFFFFLLLLLLLLDDDDDDDDLLLLLLLLEEEEEEEEEPPPPPPPTTTTTTTVVVVVVVVVVVVVVDDDDDDDDEEEEEEEEEVVVVVVVRRRRRRRRRRRTTTTTTTGGGGTTTTTTTYYYYYYYYYYYYRRRRRRRRRRRQQQQQQQQQLLLLLLLLFFFFFFFFFFFHHHHHHHHHHPPPPPPPEEEEEEEEEQQQQQQQQQLLLLLLLLIIIIIIIISSSSSSGGGGKKKKKKKKKEEEEEEEEEDDDDDDDDAAAAAAAAAANNNNNNNNNNNNNNNNFFFFFFFFFFFAAAAARRRRRRRRRRRGGGGHHHHHHHHHHYYYYYYYYYYYYTTTTTTTIIIIIIIIGGGGKKKKKKKKKEEEEEEEEEIIIIIIIIVVVVVVVDDDDDDDDLLLLLLLLAAAAALLLLLLLLDDDDDDDDRRRRRRRRRRRIIIIIIIIRRRRRRRRRRRKKKKKKKKKLLLLLLLLAAAAADDDDDDDDNNNNNNNNCCCCCCTTTTTTTGGGGLLLLLLLLQQQQQQQQQGGGGFFFFFFFFFFFLLLLLLLLVVVVVVVFFFFFFFFFFFNNNNNNNNAAAAAVVVVVVVGGGGGGGGGGGGTTTTTTTGGGGSSSSSSGGGGLLLLLLLLGGGGSSSSSSLLLLLLLLLLLLLLLLLLLLLLLLEEEEEEEEERRRRRRRRRRRLLLLLLLLSSSSSSVVVVVVVDDDDDDDDYYYYYYYYYYYYGGGGKKKKKKKKKKKKKKKKKKSSSSSSKKKKKKKKKLLLLLLLLGGGGFFFFFFFFFFFTTTTTTTVVVVVVVYYYYYYYYYYYYPPPPPPPSSSSSSPPPPPPPQQQQQQQQQVVVVVVVSSSSSSTTTTTTTAAAAAVVVVVVVVVVVVVVEEEEEEEEEPPPPPPPYYYYYYYYYYYYNNNNNNNNSSSSSSVVVVVVVLLLLLLLLSSSSSSTTTTTTTHHHHHHHHHHSSSSSSLLLLLLLLLLLLLLLLEEEEEEEEEHHHHHHHHHHTTTTTTTDDDDDDDDVVVVVVVAAAAAVVVVVVVMMMMMMMMLLLLLLLLDDDDDDDDNNNNNNNNEEEEEEEEEAAAAAIIIIIIIIYYYYYYYYYYYYDDDDDDDDIIIIIIIICCCCCCRRRRRRRRRRRRRRRRRRRRRRSSSSSSLLLLLLLLDDDDDDDDIIIIIIIIEEEEEEEEERRRRRRRRRRRPPPPPPPTTTTTTTYYYYYYYYYYYYTTTTTTTNNNNNNNNLLLLLLLLNNNNNNNNRRRRRRRRRRRLLLLLLLLIIIIIIIIAAAAAQQQQQQQQQVVVVVVVIIIIIIIISSSSSSSSSSSSLLLLLLLLTTTTTTTAAAAASSSSSSLLLLLLLLRRRRRRRRRRRFFFFFFFFFFFDDDDDDDDGGGGAAAAALLLLLLLLNNNNNNNNVVVVVVVDDDDDDDDVVVVVVVTTTTTTTEEEEEEEEEFFFFFFFFFFFQQQQQQQQQTTTTTTTNNNNNNNNLLLLLLLLVVVVVVVPPPPPPPYYYYYYYYYYYYPPPPPPPRRRRRRRRRRRIIIIIIIIHHHHHHHHHHFFFFFFFFFFFMMMMMMMMLLLLLLLLSSSSSSSSSSSSYYYYYYYYYYYYAAAAAPPPPPPPIIIIIIIIIIIIIIIISSSSSSAAAAAEEEEEEEEEKKKKKKKKKAAAAAYYYYYYYYYYYYHHHHHHHHHHEEEEEEEEEQQQQQQQQQLLLLLLLLSSSSSSVVVVVVVAAAAAEEEEEEEEEIIIIIIIITTTTTTTNNNNNNNNAAAAAAAAAAFFFFFFFFFFFEEEEEEEEEPPPPPPPAAAAASSSSSSMMMMMMMMMMMMMMMMVVVVVVVKKKKKKKKKCCCCCCDDDDDDDDPPPPPPPRRRRRRRRRRRHHHHHHHHHHGGGGKKKKKKKKKYYYYYYYYYYYYMMMMMMMMAAAAACCCCCCCCCCCCLLLLLLLLMMMMMMMMYYYYYYYYYYYYRRRRRRRRRRRGGGGDDDDDDDDVVVVVVVVVVVVVVPPPPPPPKKKKKKKKKDDDDDDDDVVVVVVVNNNNNNNNAAAAAAAAAAVVVVVVVAAAAATTTTTTTIIIIIIIIKKKKKKKKKTTTTTTTKKKKKKKKKRRRRRRRRRRRTTTTTTTIIIIIIIIQQQQQQQQQFFFFFFFFFFFVVVVVVVDDDDDDDDWWWWWWWWWWWWWWCCCCCCPPPPPPPTTTTTTTGGGGFFFFFFFFFFFKKKKKKKKKCCCCCCGGGGIIIIIIIINNNNNNNNYYYYYYYYYYYYQQQQQQQQQPPPPPPPPPPPPPPTTTTTTTVVVVVVVVVVVVVVPPPPPPPGGGGGGGGDDDDDDDDLLLLLLLLAAAAAKKKKKKKKKVVVVVVVQQQQQQQQQRRRRRRRRRRRAAAAAVVVVVVVCCCCCCMMMMMMMMIIIIIIIISSSSSSNNNNNNNNSSSSSSTTTTTTTAAAAAIIIIIIIIGGGGEEEEEEEEEIIIIIIIIFFFFFFFFFFFSSSSSSRRRRRRRRRRRLLLLLLLLDDDDDDDDHHHHHHHHHHKKKKKKKKKFFFFFFFFFFFDDDDDDDDLLLLLLLLMMMMMMMMYYYYYYYYYYYYAAAAAKKKKKKKKKRRRRRRRRRRRAAAAAFFFFFFFFFFFVVVVVVVHHHHHHHHHHWWWWWWWWWWWWWWYYYYYYYYYYYYVVVVVVVGGGGEEEEEEEEEGGGGMMMMMMMMEEEEEEEEEEEEEEEEEEGGGGEEEEEEEEEFFFFFFFFFFFSSSSSSEEEEEEEEEAAAAARRRRRRRRRRREEEEEEEEEDDDDDDDDLLLLLLLLAAAAAAAAAALLLLLLLLEEEEEEEEEKKKKKKKKKDDDDDDDDFFFFFFFFFFFEEEEEEEEEEEEEEEEEEVVVVVVVGGGGAAAAAEEEEEEEEESSSSSSAAAAAEEEEEEEEEGGGGAAAAAGGGGEEEEEEEEEGGGGEEEEEEEEEGGGGEEEEEEEEEEEEEEEEEEYYYYYYYYYYYYY

SEQ ID NO: 23 - protein, 3503 aa, Saccharomyces cerevisiae
MMMMMMMMRRRRRRRRRRREEEEEEEEEVVVVVVVIIIIIIIISSSSSSIIIIIIIINNNNNNNNVVVVVVVGGGGQQQQQQQQQAAAAAGGGGCCCCCCQQQQQQQQQIIIIIIIIGGGGNNNNNNNNAAAAACCCCCCWWWWWWWWWWWWWWEEEEEEEEELLLLLLLLYYYYYYYYYYYYSSSSSSLLLLLLLLEEEEEEEEEHHHHHHHHHHGGGGIIIIIIIIKKKKKKKKKPPPPPPPDDDDDDDDGGGGHHHHHHHHHHLLLLLLLLEEEEEEEEEDDDDDDDDGGGGLLLLLLLLSSSSSSKKKKKKKKKPPPPPPPKKKKKKKKKGGGGGGGGEEEEEEEEEEEEEEEEEEGGGGFFFFFFFFFFFSSSSSSTTTTTTTFFFFFFFFFFFFFFFFFFFFFFHHHHHHHHHHEEEEEEEEETTTTTTTGGGGYYYYYYYYYYYYGGGGKKKKKKKKKFFFFFFFFFFFVVVVVVVPPPPPPPRRRRRRRRRRRAAAAAIIIIIIIIYYYYYYYYYYYYVVVVVVVDDDDDDDDLLLLLLLLEEEEEEEEEPPPPPPPNNNNNNNNVVVVVVVIIIIIIIIDDDDDDDDEEEEEEEEEVVVVVVVRRRRRRRRRRRNNNNNNNNGGGGPPPPPPPYYYYYYYYYYYYKKKKKKKKKDDDDDDDDLLLLLLLLFFFFFFFFFFFHHHHHHHHHHPPPPPPPEEEEEEEEEQQQQQQQQQLLLLLLLLIIIIIIIISSSSSSGGGGKKKKKKKKKEEEEEEEEEDDDDDDDDAAAAAAAAAANNNNNNNNNNNNNNNNYYYYYYYYYYYYAAAAARRRRRRRRRRRGGGGHHHHHHHHHHYYYYYYYYYYYYTTTTTTTVVVVVVVGGGGRRRRRRRRRRREEEEEEEEEIIIIIIIILLLLLLLLGGGGDDDDDDDDVVVVVVVLLLLLLLLDDDDDDDDRRRRRRRRRRRIIIIIIIIRRRRRRRRRRRKKKKKKKKKLLLLLLLLAAAAADDDDDDDDQQQQQQQQQCCCCCCDDDDDDDDGGGGLLLLLLLLQQQQQQQQQGGGGFFFFFFFFFFFLLLLLLLLFFFFFFFFFFFTTTTTTTHHHHHHHHHHSSSSSSLLLLLLLLGGGGGGGGGGGGTTTTTTTGGGGSSSSSSGGGGLLLLLLLLGGGGSSSSSSLLLLLLLLLLLLLLLLLLLLLLLLEEEEEEEEEEEEEEEEEELLLLLLLLSSSSSSAAAAAEEEEEEEEEYYYYYYYYYYYYGGGGKKKKKKKKKKKKKKKKKKSSSSSSKKKKKKKKKLLLLLLLLEEEEEEEEEFFFFFFFFFFFAAAAAVVVVVVVYYYYYYYYYYYYPPPPPPPAAAAAPPPPPPPQQQQQQQQQVVVVVVVSSSSSSTTTTTTTSSSSSSVVVVVVVVVVVVVVEEEEEEEEEPPPPPPPYYYYYYYYYYYYNNNNNNNNTTTTTTTVVVVVVVLLLLLLLLTTTTTTTTTTTTTTHHHHHHHHHHTTTTTTTTTTTTTTLLLLLLLLEEEEEEEEEHHHHHHHHHHAAAAADDDDDDDDCCCCCCTTTTTTTFFFFFFFFFFFMMMMMMMMVVVVVVVDDDDDDDDNNNNNNNNEEEEEEEEEAAAAAIIIIIIIIYYYYYYYYYYYYDDDDDDDDMMMMMMMMCCCCCCKKKKKKKKKRRRRRRRRRRRNNNNNNNNLLLLLLLLDDDDDDDDIIIIIIIIPPPPPPPRRRRRRRRRRRPPPPPPPSSSSSSFFFFFFFFFFFAAAAANNNNNNNNLLLLLLLLNNNNNNNNNNNNNNNNLLLLLLLLIIIIIIIIAAAAAQQQQQQQQQVVVVVVVVVVVVVVSSSSSSSSSSSSVVVVVVVTTTTTTTAAAAASSSSSSLLLLLLLLRRRRRRRRRRRFFFFFFFFFFFDDDDDDDDGGGGSSSSSSLLLLLLLLNNNNNNNNVVVVVVVDDDDDDDDLLLLLLLLNNNNNNNNEEEEEEEEEFFFFFFFFFFFQQQQQQQQQTTTTTTTNNNNNNNNLLLLLLLLVVVVVVVPPPPPPPYYYYYYYYYYYYPPPPPPPRRRRRRRRRRRIIIIIIIIHHHHHHHHHHFFFFFFFFFFFPPPPPPPLLLLLLLLVVVVVVVSSSSSSYYYYYYYYYYYYSSSSSSPPPPPPPVVVVVVVLLLLLLLLSSSSSSKKKKKKKKKSSSSSSKKKKKKKKKAAAAAFFFFFFFFFFFHHHHHHHHHHEEEEEEEEESSSSSSNNNNNNNNSSSSSSVVVVVVVSSSSSSEEEEEEEEEIIIIIIIITTTTTTTNNNNNNNNAAAAACCCCCCFFFFFFFFFFFEEEEEEEEEPPPPPPPGGGGNNNNNNNNQQQQQQQQQMMMMMMMMVVVVVVVKKKKKKKKKCCCCCCDDDDDDDDPPPPPPPRRRRRRRRRRRDDDDDDDDGGGGKKKKKKKKKYYYYYYYYYYYYMMMMMMMMAAAAATTTTTTTCCCCCCLLLLLLLLLLLLLLLLYYYYYYYYYYYYRRRRRRRRRRRGGGGDDDDDDDDVVVVVVVVVVVVVVTTTTTTTRRRRRRRRRRRDDDDDDDDVVVVVVVQQQQQQQQQRRRRRRRRRRRAAAAAVVVVVVVEEEEEEEEEQQQQQQQQQVVVVVVVKKKKKKKKKNNNNNNNNKKKKKKKKKKKKKKKKKKTTTTTTTVVVVVVVQQQQQQQQQLLLLLLLLVVVVVVVDDDDDDDDWWWWWWWWWWWWWWCCCCCCPPPPPPPTTTTTTTGGGGFFFFFFFFFFFKKKKKKKKKIIIIIIIIGGGGIIIIIIIICCCCCCYYYYYYYYYYYYEEEEEEEEEPPPPPPPPPPPPPPTTTTTTTAAAAATTTTTTTPPPPPPPNNNNNNNNSSSSSSQQQQQQQQQLLLLLLLLAAAAATTTTTTTVVVVVVVDDDDDDDDRRRRRRRRRRRAAAAAVVVVVVVCCCCCCMMMMMMMMLLLLLLLLSSSSSSNNNNNNNNTTTTTTTTTTTTTTSSSSSSIIIIIIIIAAAAAEEEEEEEEEAAAAAWWWWWWWWWWWWWWKKKKKKKKKRRRRRRRRRRRIIIIIIIIDDDDDDDDRRRRRRRRRRRKKKKKKKKKFFFFFFFFFFFDDDDDDDDLLLLLLLLMMMMMMMMYYYYYYYYYYYYAAAAAKKKKKKKKKRRRRRRRRRRRAAAAAFFFFFFFFFFFVVVVVVVHHHHHHHHHHWWWWWWWWWWWWWWYYYYYYYYYYYYVVVVVVVGGGGEEEEEEEEEGGGGMMMMMMMMEEEEEEEEEEEEEEEEEEGGGGEEEEEEEEEFFFFFFFFFFFTTTTTTTEEEEEEEEEAAAAARRRRRRRRRRREEEEEEEEEDDDDDDDDLLLLLLLLAAAAAAAAAALLLLLLLLEEEEEEEEERRRRRRRRRRRDDDDDDDDYYYYYYYYYYYYIIIIIIIIEEEEEEEEEVVVVVVVGGGGAAAAADDDDDDDDSSSSSSYYYYYYYYYYYYAAAAAEEEEEEEEEEEEEEEEEEEEEEEEEEEEEEEEEEEEFFFFFFFFFFFF

SEQ ID NO: 24 - protein, 2823 aa, Anemia phyllitidis
LLLLLLLLFFFFFFFFFFFHHHHHHHHHHPPPPPPPEEEEEEEEEQQQQQQQQQLLLLLLLLIIIIIIIISSSSSSGGGGKKKKKKKKKEEEEEEEEEDDDDDDDDAAAAAAAAAANNNNNNNNNNNNNNNNFFFFFFFFFFFAAAAARRRRRRRRRRRGGGGHHHHHHHHHHYYYYYYYYYYYYTTTTTTTVVVVVVVGGGGKKKKKKKKKEEEEEEEEEIIIIIIIIVVVVVVVDDDDDDDDLLLLLLLLCCCCCCLLLLLLLLDDDDDDDDRRRRRRRRRRRVVVVVVVRRRRRRRRRRRKKKKKKKKKLLLLLLLLSSSSSSDDDDDDDDNNNNNNNNCCCCCCTTTTTTTGGGGLLLLLLLLQQQQQQQQQGGGGFFFFFFFFFFFLLLLLLLLVVVVVVVFFFFFFFFFFFNNNNNNNNAAAAAVVVVVVVGGGGGGGGGGGGTTTTTTTGGGGSSSSSSGGGGLLLLLLLLGGGGSSSSSSLLLLLLLLLLLLLLLLLLLLLLLLEEEEEEEEERRRRRRRRRRRLLLLLLLLSSSSSSVVVVVVVDDDDDDDDYYYYYYYYYYYYGGGGKKKKKKKKKKKKKKKKKKSSSSSSKKKKKKKKKLLLLLLLLGGGGFFFFFFFFFFFTTTTTTTIIIIIIIIYYYYYYYYYYYYPPPPPPPSSSSSSPPPPPPPQQQQQQQQQVVVVVVVSSSSSSTTTTTTTAAAAAVVVVVVVVVVVVVVEEEEEEEEEPPPPPPPYYYYYYYYYYYYNNNNNNNNSSSSSSVVVVVVVLLLLLLLLSSSSSSTTTTTTTHHHHHHHHHHSSSSSSLLLLLLLLLLLLLLLLEEEEEEEEEHHHHHHHHHHTTTTTTTDDDDDDDDVVVVVVVAAAAAVVVVVVVLLLLLLLLLLLLLLLLDDDDDDDDNNNNNNNNEEEEEEEEEAAAAAIIIIIIIIYYYYYYYYYYYYDDDDDDDDIIIIIIIICCCCCCRRRRRRRRRRRRRRRRRRRRRRSSSSSSLLLLLLLLLLLLLLLLDDDDDDDDIIIIIIIIEEEEEEEEERRRRRRRRRRRPPPPPPPTTTTTTTYYYYYYYYYYYYTTTTTTTNNNNNNNNLLLLLLLLNNNNNNNNRRRRRRRRRRRLLLLLLLLVVVVVVVSSSSSSQQQQQQQQQIIIIIIIIIIIIIIIISSSSSSSSSSSSLLLLLLLLTTTTTTTTTTTTTTSSSSSSLLLLLLLLRRRRRRRRRRRFFFFFFFFFFFDDDDDDDDGGGGAAAAALLLLLLLLNNNNNNNNVVVVVVVDDDDDDDDVVVVVVVTTTTTTTEEEEEEEEEFFFFFFFFFFFQQQQQQQQQTTTTTTTNNNNNNNNLLLLLLLLVVVVVVVPPPPPPPYYYYYYYYYYYYPPPPPPPRRRRRRRRRRRIIIIIIIIHHHHHHHHHHFFFFFFFFFFFMMMMMMMMLLLLLLLLSSSSSSSSSSSSYYYYYYYYYYYYAAAAAPPPPPPPVVVVVVVIIIIIIIISSSSSSAAAAAAAAAAKKKKKKKKKAAAAAYYYYYYYYYYYYHHHHHHHHHHEEEEEEEEEQQQQQQQQQLLLLLLLLSSSSSSVVVVVVVPPPPPPPEEEEEEEEEIIIIIIIITTTTTTTNNNNNNNNAAAAAVVVVVVVFFFFFFFFFFFEEEEEEEEEPPPPPPPSSSSSSSSSSSSMMMMMMMMMMMMMMMMAAAAAKKKKKKKKKCCCCCCDDDDDDDDPPPPPPPRRRRRRRRRRRHHHHHHHHHHGGGGKKKKKKKKKYYYYYYYYYYYYMMMMMMMMAAAAACCCCCCCCCCCCLLLLLLLLMMMMMMMMYYYYYYYYYYYYRRRRRRRRRRRGGGGDDDDDDDDVVVVVVVVVVVVVVPPPPPPPKKKKKKKKKDDDDDDDDVVVVVVVNNNNNNNNAAAAAAAAAAVVVVVVVAAAAATTTTTTTIIIIIIIIKKKKKKKKKTTTTTTTKKKKKKKKKRRRRRRRRRRRTTTTTTTVVVVVVVQQQQQQQQQFFFFFFFFFFFVVVVVVVDDDDDDDDWWWWWWWWWWWWWWCCCCCCPPPPPPPTTTTTTTGGGGFFFFFFFFFFFKKKKKKKKKCCCCCCGGGGIIIIIIIINNNNNNNNYYYYYYYYYYYYQQQQQQQQQPPPPPPPPPPPPPPSSSSSSVVVVVVVVVVVVVVPPPPPPPGGGGGGGGDDDDDDDDLLLLLLLLAAAAAKKKKKKKKKVVVVVVVQQQQQQQQQRRRRRRRRRRRAAAAAVVVVVVVCCCCCCMMMMMMMMIIIIIIIISSSSSSNNNNNNNNNNNNNNNNTTTTTTTAAAAAVVVVVVVAAAAAEEEEEEEEEVVVVVVVFFFFFFFFFFFSSSSSSRRRRRRRRRRRIIIIIIIIDDDDDDDDHHHHHHHHHHKKKKKKKKKFFFFFFFFFFFDDDDDDDDLLLLLLLLMMMMMMMMYYYYYYYYYYYYAAAAAKKKKKKKKKLLLLLLLLAAAAAFFFFFFFFFFFVVVVVVVHHHHHHHHHHWWWWWWWWWWWWWWYYYYYYYYYYYYVVVVVVVGGGGEEEEEEEEEGGGGMMMMMMMMEEEEEEEEEEEEEEEEEEGGGGEEEEEEEEEFFFFFFFFFFFSSSSSSEEEEEEEEEAAAAARRRRRRRRRRREEEEEEEEEDDDDDDDDLLLLLLLLAAAAAAAAAALLLLLLLLEEEEEEEEEKKKKKKKKKDDDDDDDDYYYYYYYYYYYYEEEEEEEEEEEEEEEEEEVVVVVVVAAAAAAAAAAEEEEEEEEEGGGGVVVVVVVDDDDDDDDEEEEEEEEEPPPPPPPEEEEEEEEEGGGGDDDDDDDDDDDDDDDDYYYYYYYYYYYYY

SEQ ID NO: 25 - protein, 3479 aa, Arabidopsis thaliana
MMMMMMMMRRRRRRRRRRREEEEEEEEECCCCCCIIIIIIIISSSSSSIIIIIIIIHHHHHHHHHHIIIIIIIIGGGGQQQQQQQQQAAAAAGGGGIIIIIIIIQQQQQQQQQVVVVVVVGGGGNNNNNNNNAAAAACCCCCCWWWWWWWWWWWWWWEEEEEEEEELLLLLLLLYYYYYYYYYYYYCCCCCCLLLLLLLLEEEEEEEEEHHHHHHHHHHGGGGIIIIIIIIQQQQQQQQQPPPPPPPDDDDDDDDGGGGQQQQQQQQQMMMMMMMMPPPPPPPSSSSSSDDDDDDDDKKKKKKKKKTTTTTTTVVVVVVVGGGGGGGGGGGGDDDDDDDDDDDDDDDDAAAAAFFFFFFFFFFFNNNNNNNNTTTTTTTFFFFFFFFFFFFFFFFFFFFFFSSSSSSEEEEEEEEETTTTTTTGGGGAAAAAGGGGKKKKKKKKKHHHHHHHHHHVVVVVVVPPPPPPPRRRRRRRRRRRAAAAAVVVVVVVFFFFFFFFFFFVVVVVVVDDDDDDDDLLLLLLLLEEEEEEEEEPPPPPPPTTTTTTTVVVVVVVIIIIIIIIDDDDDDDDEEEEEEEEEVVVVVVVRRRRRRRRRRRTTTTTTTGGGGTTTTTTTYYYYYYYYYYYYRRRRRRRRRRRQQQQQQQQQLLLLLLLLFFFFFFFFFFFHHHHHHHHHHPPPPPPPEEEEEEEEEQQQQQQQQQLLLLLLLLIIIIIIIISSSSSSGGGGKKKKKKKKKEEEEEEEEEDDDDDDDDAAAAAAAAAANNNNNNNNNNNNNNNNFFFFFFFFFFFAAAAARRRRRRRRRRRGGGGHHHHHHHHHHYYYYYYYYYYYYTTTTTTTIIIIIIIIGGGGKKKKKKKKKEEEEEEEEEIIIIIIIIVVVVVVVDDDDDDDDLLLLLLLLCCCCCCLLLLLLLLDDDDDDDDRRRRRRRRRRRIIIIIIIIRRRRRRRRRRRKKKKKKKKKLLLLLLLLAAAAADDDDDDDDNNNNNNNNCCCCCCTTTTTTTGGGGLLLLLLLLQQQQQQQQQGGGGFFFFFFFFFFFLLLLLLLLVVVVVVVFFFFFFFFFFFNNNNNNNNAAAAAVVVVVVVGGGGGGGGGGGGTTTTTTTGGGGSSSSSSGGGGLLLLLLLLGGGGSSSSSSLLLLLLLLLLLLLLLLLLLLLLLLEEEEEEEEERRRRRRRRRRRLLLLLLLLSSSSSSVVVVVVVDDDDDDDDYYYYYYYYYYYYGGGGKKKKKKKKKKKKKKKKKKSSSSSSKKKKKKKKKLLLLLLLLGGGGFFFFFFFFFFFTTTTTTTVVVVVVVYYYYYYYYYYYYPPPPPPPSSSSSSPPPPPPPQQQQQQQQQVVVVVVVSSSSSSTTTTTTTSSSSSSVVVVVVVVVVVVVVEEEEEEEEEPPPPPPPYYYYYYYYYYYYNNNNNNNNSSSSSSVVVVVVVLLLLLLLLSSSSSSTTTTTTTHHHHHHHHHHSSSSSSLLLLLLLLLLLLLLLLEEEEEEEEEHHHHHHHHHHTTTTTTTDDDDDDDDVVVVVVVSSSSSSIIIIIIIILLLLLLLLLLLLLLLLDDDDDDDDNNNNNNNNEEEEEEEEEAAAAAIIIIIIIIYYYYYYYYYYYYDDDDDDDDIIIIIIIICCCCCCRRRRRRRRRRRRRRRRRRRRRRSSSSSSLLLLLLLLSSSSSSIIIIIIIIEEEEEEEEERRRRRRRRRRRPPPPPPPTTTTTTTYYYYYYYYYYYYTTTTTTTNNNNNNNNLLLLLLLLNNNNNNNNRRRRRRRRRRRLLLLLLLLVVVVVVVSSSSSSQQQQQQQQQVVVVVVVIIIIIIIISSSSSSSSSSSSLLLLLLLLTTTTTTTAAAAASSSSSSLLLLLLLLRRRRRRRRRRRFFFFFFFFFFFDDDDDDDDGGGGAAAAALLLLLLLLNNNNNNNNVVVVVVVDDDDDDDDVVVVVVVTTTTTTTEEEEEEEEEFFFFFFFFFFFQQQQQQQQQTTTTTTTNNNNNNNNLLLLLLLLVVVVVVVPPPPPPPYYYYYYYYYYYYPPPPPPPRRRRRRRRRRRIIIIIIIIHHHHHHHHHHFFFFFFFFFFFMMMMMMMMLLLLLLLLSSSSSSSSSSSSYYYYYYYYYYYYAAAAAPPPPPPPVVVVVVVIIIIIIIISSSSSSAAAAAEEEEEEEEEKKKKKKKKKAAAAAFFFFFFFFFFFHHHHHHHHHHEEEEEEEEEQQQQQQQQQLLLLLLLLSSSSSSVVVVVVVAAAAAEEEEEEEEEIIIIIIIITTTTTTTNNNNNNNNSSSSSSAAAAAFFFFFFFFFFFEEEEEEEEEPPPPPPPAAAAASSSSSSMMMMMMMMMMMMMMMMAAAAAKKKKKKKKKCCCCCCDDDDDDDDPPPPPPPRRRRRRRRRRRHHHHHHHHHHGGGGKKKKKKKKKYYYYYYYYYYYYMMMMMMMMAAAAACCCCCCCCCCCCLLLLLLLLMMMMMMMMYYYYYYYYYYYYRRRRRRRRRRRGGGGDDDDDDDDVVVVVVVVVVVVVVPPPPPPPKKKKKKKKKDDDDDDDDVVVVVVVNNNNNNNNAAAAAAAAAAVVVVVVVGGGGTTTTTTTIIIIIIIIKKKKKKKKKTTTTTTTKKKKKKKKKRRRRRRRRRRRTTTTTTTIIIIIIIIQQQQQQQQQFFFFFFFFFFFVVVVVVVDDDDDDDDWWWWWWWWWWWWWWCCCCCCPPPPPPPTTTTTTTGGGGFFFFFFFFFFFKKKKKKKKKCCCCCCGGGGIIIIIIIINNNNNNNNYYYYYYYYYYYYQQQQQQQQQPPPPPPPPPPPPPPTTTTTTTVVVVVVVVVVVVVVPPPPPPPGGGGGGGGDDDDDDDDLLLLLLLLAAAAAKKKKKKKKKVVVVVVVQQQQQQQQQRRRRRRRRRRRAAAAAVVVVVVVCCCCCCMMMMMMMMIIIIIIIISSSSSSNNNNNNNNSSSSSSTTTTTTTSSSSSSVVVVVVVAAAAAEEEEEEEEEVVVVVVVFFFFFFFFFFFSSSSSSRRRRRRRRRRRIIIIIIIIDDDDDDDDHHHHHHHHHHKKKKKKKKKFFFFFFFFFFFDDDDDDDDLLLLLLLLMMMMMMMMYYYYYYYYYYYYAAAAAKKKKKKKKKRRRRRRRRRRRAAAAAFFFFFFFFFFFVVVVVVVHHHHHHHHHHWWWWWWWWWWWWWWYYYYYYYYYYYYVVVVVVVGGGGEEEEEEEEEGGGGMMMMMMMMEEEEEEEEEEEEEEEEEEGGGGEEEEEEEEEFFFFFFFFFFFSSSSSSEEEEEEEEEAAAAARRRRRRRRRRREEEEEEEEEDDDDDDDDLLLLLLLLAAAAAAAAAALLLLLLLLEEEEEEEEEKKKKKKKKKDDDDDDDDYYYYYYYYYYYYEEEEEEEEEEEEEEEEEEVVVVVVVGGGGAAAAAEEEEEEEEEGGGGGGGGDDDDDDDDDDDDDDDDEEEEEEEEEDDDDDDDDDDDDDDDDEEEEEEEEEGGGGEEEEEEEEEEEEEEEEEEYYYYYYYYYYYYY

SEQ ID NO: 26 - protein, 3511 aa, Caenorhabditis elegans
MMMMMMMMRRRRRRRRRRREEEEEEEEEVVVVVVVIIIIIIIISSSSSSIIIIIIIIHHHHHHHHHHVVVVVVVGGGGQQQQQQQQQAAAAAGGGGVVVVVVVQQQQQQQQQIIIIIIIIGGGGNNNNNNNNAAAAACCCCCCWWWWWWWWWWWWWWEEEEEEEEELLLLLLLLYYYYYYYYYYYYCCCCCCLLLLLLLLEEEEEEEEEHHHHHHHHHHGGGGIIIIIIIIQQQQQQQQQPPPPPPPDDDDDDDDGGGGTTTTTTTMMMMMMMMPPPPPPPTTTTTTTQQQQQQQQQSSSSSSTTTTTTTNNNNNNNNEEEEEEEEEGGGGEEEEEEEEESSSSSSFFFFFFFFFFFTTTTTTTTTTTTTTFFFFFFFFFFFFFFFFFFFFFFSSSSSSDDDDDDDDTTTTTTTGGGGSSSSSSGGGGRRRRRRRRRRRYYYYYYYYYYYYVVVVVVVPPPPPPPRRRRRRRRRRRSSSSSSIIIIIIIIFFFFFFFFFFFVVVVVVVDDDDDDDDLLLLLLLLEEEEEEEEEPPPPPPPTTTTTTTVVVVVVVVVVVVVVDDDDDDDDEEEEEEEEEIIIIIIIIRRRRRRRRRRRTTTTTTTGGGGTTTTTTTYYYYYYYYYYYYKKKKKKKKKKKKKKKKKKLLLLLLLLFFFFFFFFFFFHHHHHHHHHHPPPPPPPEEEEEEEEEQQQQQQQQQMMMMMMMMIIIIIIIITTTTTTTGGGGKKKKKKKKKEEEEEEEEEDDDDDDDDAAAAAAAAAANNNNNNNNNNNNNNNNYYYYYYYYYYYYAAAAARRRRRRRRRRRGGGGHHHHHHHHHHYYYYYYYYYYYYTTTTTTTVVVVVVVGGGGKKKKKKKKKEEEEEEEEELLLLLLLLIIIIIIIIDDDDDDDDTTTTTTTVVVVVVVLLLLLLLLDDDDDDDDRRRRRRRRRRRIIIIIIIIRRRRRRRRRRRRRRRRRRRRRRLLLLLLLLAAAAADDDDDDDDNNNNNNNNCCCCCCSSSSSSGGGGLLLLLLLLQQQQQQQQQGGGGFFFFFFFFFFFFFFFFFFFFFFVVVVVVVFFFFFFFFFFFHHHHHHHHHHSSSSSSFFFFFFFFFFFGGGGGGGGGGGGTTTTTTTGGGGSSSSSSGGGGFFFFFFFFFFFTTTTTTTSSSSSSLLLLLLLLLLLLLLLLMMMMMMMMEEEEEEEEERRRRRRRRRRRLLLLLLLLSSSSSSVVVVVVVDDDDDDDDYYYYYYYYYYYYGGGGKKKKKKKKKKKKKKKKKKSSSSSSKKKKKKKKKLLLLLLLLEEEEEEEEEFFFFFFFFFFFSSSSSSIIIIIIIIYYYYYYYYYYYYPPPPPPPAAAAAPPPPPPPQQQQQQQQQVVVVVVVSSSSSSTTTTTTTAAAAAVVVVVVVVVVVVVVEEEEEEEEEPPPPPPPYYYYYYYYYYYYNNNNNNNNSSSSSSIIIIIIIILLLLLLLLTTTTTTTTTTTTTTHHHHHHHHHHTTTTTTTTTTTTTTLLLLLLLLEEEEEEEEEHHHHHHHHHHSSSSSSDDDDDDDDCCCCCCAAAAAFFFFFFFFFFFMMMMMMMMVVVVVVVDDDDDDDDNNNNNNNNEEEEEEEEEAAAAAIIIIIIIIYYYYYYYYYYYYDDDDDDDDIIIIIIIICCCCCCRRRRRRRRRRRRRRRRRRRRRRNNNNNNNNLLLLLLLLDDDDDDDDVVVVVVVEEEEEEEEERRRRRRRRRRRPPPPPPPSSSSSSYYYYYYYYYYYYTTTTTTTNNNNNNNNLLLLLLLLNNNNNNNNRRRRRRRRRRRIIIIIIIIIIIIIIIISSSSSSQQQQQQQQQVVVVVVVVVVVVVVSSSSSSSSSSSSIIIIIIIITTTTTTTAAAAASSSSSSLLLLLLLLRRRRRRRRRRRFFFFFFFFFFFDDDDDDDDGGGGAAAAALLLLLLLLNNNNNNNNVVVVVVVDDDDDDDDLLLLLLLLNNNNNNNNEEEEEEEEEFFFFFFFFFFFQQQQQQQQQTTTTTTTNNNNNNNNLLLLLLLLVVVVVVVPPPPPPPYYYYYYYYYYYYPPPPPPPRRRRRRRRRRRIIIIIIIIHHHHHHHHHHFFFFFFFFFFFPPPPPPPLLLLLLLLAAAAAAAAAAYYYYYYYYYYYYTTTTTTTPPPPPPPLLLLLLLLIIIIIIIISSSSSSAAAAAEEEEEEEEEKKKKKKKKKAAAAAYYYYYYYYYYYYHHHHHHHHHHEEEEEEEEEAAAAALLLLLLLLSSSSSSVVVVVVVSSSSSSDDDDDDDDIIIIIIIITTTTTTTNNNNNNNNSSSSSSCCCCCCFFFFFFFFFFFEEEEEEEEEPPPPPPPAAAAANNNNNNNNQQQQQQQQQMMMMMMMMVVVVVVVKKKKKKKKKCCCCCCDDDDDDDDPPPPPPPRRRRRRRRRRRHHHHHHHHHHGGGGKKKKKKKKKYYYYYYYYYYYYMMMMMMMMAAAAAVVVVVVVCCCCCCLLLLLLLLLLLLLLLLYYYYYYYYYYYYRRRRRRRRRRRGGGGDDDDDDDDVVVVVVVVVVVVVVPPPPPPPKKKKKKKKKDDDDDDDDVVVVVVVNNNNNNNNTTTTTTTAAAAAIIIIIIIIAAAAAAAAAAIIIIIIIIKKKKKKKKKTTTTTTTKKKKKKKKKRRRRRRRRRRRTTTTTTTIIIIIIIIQQQQQQQQQFFFFFFFFFFFVVVVVVVDDDDDDDDWWWWWWWWWWWWWWCCCCCCPPPPPPPTTTTTTTGGGGFFFFFFFFFFFKKKKKKKKKVVVVVVVGGGGIIIIIIIINNNNNNNNYYYYYYYYYYYYQQQQQQQQQPPPPPPPPPPPPPPTTTTTTTVVVVVVVVVVVVVVPPPPPPPGGGGGGGGDDDDDDDDLLLLLLLLAAAAAKKKKKKKKKVVVVVVVPPPPPPPRRRRRRRRRRRAAAAAVVVVVVVCCCCCCMMMMMMMMLLLLLLLLSSSSSSNNNNNNNNTTTTTTTTTTTTTTAAAAAIIIIIIIIAAAAAEEEEEEEEEAAAAAWWWWWWWWWWWWWWSSSSSSRRRRRRRRRRRLLLLLLLLDDDDDDDDYYYYYYYYYYYYKKKKKKKKKFFFFFFFFFFFDDDDDDDDLLLLLLLLMMMMMMMMYYYYYYYYYYYYAAAAAKKKKKKKKKRRRRRRRRRRRAAAAAFFFFFFFFFFFVVVVVVVHHHHHHHHHHWWWWWWWWWWWWWWYYYYYYYYYYYYVVVVVVVGGGGEEEEEEEEEGGGGMMMMMMMMEEEEEEEEEEEEEEEEEEGGGGEEEEEEEEEFFFFFFFFFFFTTTTTTTEEEEEEEEEAAAAARRRRRRRRRRREEEEEEEEEDDDDDDDDLLLLLLLLAAAAAAAAAALLLLLLLLEEEEEEEEEKKKKKKKKKDDDDDDDDYYYYYYYYYYYYEEEEEEEEEEEEEEEEEEVVVVVVVGGGGAAAAADDDDDDDDSSSSSSNNNNNNNNEEEEEEEEEGGGGGGGGEEEEEEEEEEEEEEEEEEEEEEEEEEEGGGGEEEEEEEEEEEEEEEEEEYYYYYYYYYYYYY

SEQ ID NO: 27 - protein, 3498 aa, Gallus gallus
MMMMMMMMRRRRRRRRRRREEEEEEEEECCCCCCIIIIIIIISSSSSSVVVVVVVHHHHHHHHHHIIIIIIIIGGGGQQQQQQQQQAAAAAGGGGVVVVVVVQQQQQQQQQIIIIIIIIGGGGNNNNNNNNAAAAACCCCCCWWWWWWWWWWWWWWEEEEEEEEELLLLLLLLFFFFFFFFFFFCCCCCCLLLLLLLLEEEEEEEEEHHHHHHHHHHSSSSSSIIIIIIIIQQQQQQQQQPPPPPPPDDDDDDDDGGGGTTTTTTTFFFFFFFFFFFSSSSSSDDDDDDDDPPPPPPPPPPPPPPSSSSSSSSSSSSDDDDDDDDDDDDDDDDSSSSSSFFFFFFFFFFFAAAAATTTTTTTFFFFFFFFFFFFFFFFFFFFFFRRRRRRRRRRREEEEEEEEETTTTTTTSSSSSSMMMMMMMMSSSSSSKKKKKKKKKYYYYYYYYYYYYVVVVVVVPPPPPPPRRRRRRRRRRRAAAAAIIIIIIIIMMMMMMMMVVVVVVVDDDDDDDDLLLLLLLLEEEEEEEEEPPPPPPPTTTTTTTVVVVVVVVVVVVVVDDDDDDDDEEEEEEEEEVVVVVVVRRRRRRRRRRRTTTTTTTGGGGTTTTTTTYYYYYYYYYYYYRRRRRRRRRRRHHHHHHHHHHLLLLLLLLFFFFFFFFFFFHHHHHHHHHHPPPPPPPEEEEEEEEEQQQQQQQQQLLLLLLLLIIIIIIIITTTTTTTGGGGKKKKKKKKKEEEEEEEEEDDDDDDDDAAAAAAAAAANNNNNNNNNNNNNNNNYYYYYYYYYYYYAAAAARRRRRRRRRRRGGGGHHHHHHHHHHYYYYYYYYYYYYTTTTTTTVVVVVVVGGGGKKKKKKKKKDDDDDDDDKKKKKKKKKVVVVVVVDDDDDDDDMMMMMMMMVVVVVVVSSSSSSDDDDDDDDRRRRRRRRRRRIIIIIIIIRRRRRRRRRRRKKKKKKKKKLLLLLLLLAAAAADDDDDDDDSSSSSSCCCCCCSSSSSSGGGGLLLLLLLLQQQQQQQQQGGGGFFFFFFFFFFFLLLLLLLLIIIIIIIIFFFFFFFFFFFHHHHHHHHHHSSSSSSFFFFFFFFFFFGGGGGGGGGGGGTTTTTTTGGGGSSSSSSGGGGFFFFFFFFFFFTTTTTTTSSSSSSLLLLLLLLLLLLLLLLMMMMMMMMEEEEEEEEERRRRRRRRRRRLLLLLLLLSSSSSSVVVVVVVEEEEEEEEEYYYYYYYYYYYYGGGGKKKKKKKKKKKKKKKKKKSSSSSSKKKKKKKKKLLLLLLLLEEEEEEEEEFFFFFFFFFFFAAAAAIIIIIIIIYYYYYYYYYYYYPPPPPPPAAAAAPPPPPPPQQQQQQQQQAAAAASSSSSSSSSSSSAAAAAVVVVVVVVVVVVVVEEEEEEEEEPPPPPPPYYYYYYYYYYYYNNNNNNNNSSSSSSVVVVVVVLLLLLLLLTTTTTTTTTTTTTTHHHHHHHHHHTTTTTTTTTTTTTTLLLLLLLLEEEEEEEEEHHHHHHHHHHSSSSSSDDDDDDDDCCCCCCVVVVVVVFFFFFFFFFFFMMMMMMMMVVVVVVVDDDDDDDDNNNNNNNNEEEEEEEEEAAAAAIIIIIIIIYYYYYYYYYYYYDDDDDDDDIIIIIIIICCCCCCHHHHHHHHHHRRRRRRRRRRRNNNNNNNNLLLLLLLLDDDDDDDDIIIIIIIIEEEEEEEEERRRRRRRRRRRPPPPPPPTTTTTTTYYYYYYYYYYYYTTTTTTTNNNNNNNNLLLLLLLLNNNNNNNNRRRRRRRRRRRLLLLLLLLIIIIIIIISSSSSSQQQQQQQQQIIIIIIIIVVVVVVVSSSSSSSSSSSSIIIIIIIITTTTTTTAAAAASSSSSSLLLLLLLLRRRRRRRRRRRFFFFFFFFFFFDDDDDDDDGGGGAAAAALLLLLLLLNNNNNNNNVVVVVVVDDDDDDDDLLLLLLLLTTTTTTTEEEEEEEEEFFFFFFFFFFFQQQQQQQQQTTTTTTTNNNNNNNNLLLLLLLLVVVVVVVPPPPPPPFFFFFFFFFFFPPPPPPPRRRRRRRRRRRIIIIIIIIHHHHHHHHHHFFFFFFFFFFFPPPPPPPLLLLLLLLVVVVVVVTTTTTTTYYYYYYYYYYYYAAAAAPPPPPPPIIIIIIIIIIIIIIIISSSSSSSSSSSSDDDDDDDDRRRRRRRRRRRAAAAAYYYYYYYYYYYYHHHHHHHHHHEEEEEEEEEQQQQQQQQQLLLLLLLLSSSSSSVVVVVVVAAAAAEEEEEEEEEIIIIIIIITTTTTTTSSSSSSSSSSSSCCCCCCFFFFFFFFFFFEEEEEEEEEPPPPPPPNNNNNNNNNNNNNNNNQQQQQQQQQMMMMMMMMVVVVVVVKKKKKKKKKCCCCCCDDDDDDDDPPPPPPPQQQQQQQQQQQQQQQQQQGGGGKKKKKKKKKYYYYYYYYYYYYMMMMMMMMAAAAACCCCCCCCCCCCMMMMMMMMLLLLLLLLYYYYYYYYYYYYRRRRRRRRRRRGGGGDDDDDDDDVVVVVVVVVVVVVVPPPPPPPKKKKKKKKKDDDDDDDDVVVVVVVNNNNNNNNVVVVVVVAAAAAIIIIIIIIAAAAAAAAAAIIIIIIIIKKKKKKKKKTTTTTTTNNNNNNNNRRRRRRRRRRRSSSSSSLLLLLLLLQQQQQQQQQFFFFFFFFFFFVVVVVVVDDDDDDDDWWWWWWWWWWWWWWCCCCCCPPPPPPPTTTTTTTGGGGFFFFFFFFFFFKKKKKKKKKVVVVVVVGGGGIIIIIIIINNNNNNNNYYYYYYYYYYYYQQQQQQQQQPPPPPPPPPPPPPPIIIIIIIIPPPPPPPTTTTTTTPPPPPPPGGGGGGGGDDDDDDDDLLLLLLLLAAAAAQQQQQQQQQVVVVVVVQQQQQQQQQRRRRRRRRRRRAAAAAVVVVVVVCCCCCCMMMMMMMMLLLLLLLLSSSSSSNNNNNNNNTTTTTTTTTTTTTTAAAAAIIIIIIIIAAAAAEEEEEEEEEAAAAAWWWWWWWWWWWWWWAAAAARRRRRRRRRRRLLLLLLLLDDDDDDDDHHHHHHHHHHKKKKKKKKKFFFFFFFFFFFDDDDDDDDLLLLLLLLMMMMMMMMYYYYYYYYYYYYAAAAAKKKKKKKKKRRRRRRRRRRRAAAAAFFFFFFFFFFFVVVVVVVHHHHHHHHHHWWWWWWWWWWWWWWYYYYYYYYYYYYVVVVVVVSSSSSSEEEEEEEEEGGGGMMMMMMMMEEEEEEEEEEEEEEEEEEGGGGEEEEEEEEEFFFFFFFFFFFAAAAAEEEEEEEEEAAAAARRRRRRRRRRREEEEEEEEEDDDDDDDDLLLLLLLLAAAAAAAAAALLLLLLLLEEEEEEEEEKKKKKKKKKDDDDDDDDYYYYYYYYYYYYDDDDDDDDEEEEEEEEEVVVVVVVAAAAATTTTTTTDDDDDDDDLLLLLLLLFFFFFFFFFFFEEEEEEEEEDDDDDDDDEEEEEEEEENNNNNNNNEEEEEEEEEAAAAAGGGGDDDDDDDDSSSSSSS

SEQ ID NO: 28 - protein, 3483 aa, Chlamydomonas reinhardtii
MMMMMMMMRRRRRRRRRRREEEEEEEEEVVVVVVVIIIIIIIISSSSSSIIIIIIIIHHHHHHHHHHIIIIIIIIGGGGQQQQQQQQQAAAAAGGGGIIIIIIIIQQQQQQQQQVVVVVVVGGGGNNNNNNNNAAAAACCCCCCWWWWWWWWWWWWWWEEEEEEEEELLLLLLLLYYYYYYYYYYYYCCCCCCLLLLLLLLEEEEEEEEEHHHHHHHHHHGGGGIIIIIIIIQQQQQQQQQPPPPPPPDDDDDDDDGGGGQQQQQQQQQMMMMMMMMPPPPPPPSSSSSSDDDDDDDDKKKKKKKKKTTTTTTTIIIIIIIIGGGGGGGGGGGGDDDDDDDDDDDDDDDDAAAAAFFFFFFFFFFFNNNNNNNNTTTTTTTFFFFFFFFFFFFFFFFFFFFFFSSSSSSEEEEEEEEETTTTTTTGGGGAAAAAGGGGKKKKKKKKKHHHHHHHHHHVVVVVVVPPPPPPPRRRRRRRRRRRCCCCCCIIIIIIIIFFFFFFFFFFFLLLLLLLLDDDDDDDDLLLLLLLLEEEEEEEEEPPPPPPPTTTTTTTVVVVVVVVVVVVVVDDDDDDDDEEEEEEEEEVVVVVVVRRRRRRRRRRRTTTTTTTGGGGTTTTTTTYYYYYYYYYYYYRRRRRRRRRRRQQQQQQQQQLLLLLLLLFFFFFFFFFFFHHHHHHHHHHPPPPPPPEEEEEEEEEQQQQQQQQQLLLLLLLLIIIIIIIISSSSSSGGGGKKKKKKKKKEEEEEEEEEDDDDDDDDAAAAAAAAAANNNNNNNNNNNNNNNNFFFFFFFFFFFAAAAARRRRRRRRRRRGGGGHHHHHHHHHHYYYYYYYYYYYYTTTTTTTIIIIIIIIGGGGKKKKKKKKKEEEEEEEEEIIIIIIIIVVVVVVVDDDDDDDDLLLLLLLLAAAAALLLLLLLLDDDDDDDDRRRRRRRRRRRIIIIIIIIRRRRRRRRRRRKKKKKKKKKLLLLLLLLAAAAADDDDDDDDNNNNNNNNCCCCCCTTTTTTTGGGGLLLLLLLLQQQQQQQQQGGGGFFFFFFFFFFFLLLLLLLLVVVVVVVFFFFFFFFFFFNNNNNNNNAAAAAVVVVVVVGGGGGGGGGGGGTTTTTTTGGGGSSSSSSGGGGLLLLLLLLGGGGSSSSSSLLLLLLLLLLLLLLLLLLLLLLLLEEEEEEEEERRRRRRRRRRRLLLLLLLLSSSSSSVVVVVVVDDDDDDDDYYYYYYYYYYYYGGGGKKKKKKKKKKKKKKKKKKSSSSSSKKKKKKKKKLLLLLLLLGGGGFFFFFFFFFFFTTTTTTTVVVVVVVYYYYYYYYYYYYPPPPPPPSSSSSSPPPPPPPQQQQQQQQQVVVVVVVSSSSSSTTTTTTTAAAAAVVVVVVVVVVVVVVEEEEEEEEEPPPPPPPYYYYYYYYYYYYNNNNNNNNSSSSSSVVVVVVVLLLLLLLLSSSSSSTTTTTTTHHHHHHHHHHSSSSSSLLLLLLLLLLLLLLLLEEEEEEEEEHHHHHHHHHHTTTTTTTDDDDDDDDVVVVVVVAAAAAVVVVVVVMMMMMMMMLLLLLLLLDDDDDDDDNNNNNNNNEEEEEEEEEAAAAAIIIIIIIIYYYYYYYYYYYYDDDDDDDDIIIIIIIICCCCCCRRRRRRRRRRRRRRRRRRRRRRSSSSSSLLLLLLLLDDDDDDDDIIIIIIIIEEEEEEEEERRRRRRRRRRRPPPPPPPTTTTTTTYYYYYYYYYYYYTTTTTTTNNNNNNNNLLLLLLLLNNNNNNNNRRRRRRRRRRRLLLLLLLLIIIIIIIIAAAAAQQQQQQQQQVVVVVVVIIIIIIIISSSSSSSSSSSSLLLLLLLLTTTTTTTAAAAASSSSSSLLLLLLLLRRRRRRRRRRRFFFFFFFFFFFDDDDDDDDGGGGAAAAALLLLLLLLNNNNNNNNVVVVVVVDDDDDDDDIIIIIIIITTTTTTTEEEEEEEEEFFFFFFFFFFFQQQQQQQQQTTTTTTTNNNNNNNNLLLLLLLLVVVVVVVPPPPPPPYYYYYYYYYYYYPPPPPPPRRRRRRRRRRRIIIIIIIIHHHHHHHHHHFFFFFFFFFFFMMMMMMMMLLLLLLLLSSSSSSSSSSSSYYYYYYYYYYYYAAAAAPPPPPPPIIIIIIIIIIIIIIIISSSSSSAAAAAEEEEEEEEEKKKKKKKKKAAAAAYYYYYYYYYYYYHHHHHHHHHHEEEEEEEEEQQQQQQQQQLLLLLLLLSSSSSSVVVVVVVAAAAAEEEEEEEEEIIIIIIIITTTTTTTNNNNNNNNAAAAAAAAAAFFFFFFFFFFFEEEEEEEEEPPPPPPPAAAAASSSSSSMMMMMMMMMMMMMMMMVVVVVVVKKKKKKKKKCCCCCCDDDDDDDDPPPPPPPLLLLLLLLHHHHHHHHHHGGGGKKKKKKKKKYYYYYYYYYYYYMMMMMMMMAAAAACCCCCCCCCCCCLLLLLLLLMMMMMMMMYYYYYYYYYYYYRRRRRRRRRRRGGGGDDDDDDDDVVVVVVVVVVVVVVPPPPPPPKKKKKKKKKDDDDDDDDVVVVVVVNNNNNNNNAAAAASSSSSSVVVVVVVAAAAATTTTTTTIIIIIIIIKKKKKKKKKTTTTTTTKKKKKKKKKRRRRRRRRRRRTTTTTTTIIIIIIIIQQQQQQQQQFFFFFFFFFFFVVVVVVVDDDDDDDDWWWWWWWWWWWWWWCCCCCCPPPPPPPTTTTTTTGGGGFFFFFFFFFFFKKKKKKKKKCCCCCCGGGGIIIIIIIINNNNNNNNYYYYYYYYYYYYQQQQQQQQQPPPPPPPPPPPPPPTTTTTTTVVVVVVVVVVVVVVPPPPPPPGGGGVVVVVVVDDDDDDDDLLLLLLLLAAAAAKKKKKKKKKVVVVVVVQQQQQQQQQRRRRRRRRRRRAAAAAVVVVVVVCCCCCCMMMMMMMMIIIIIIIISSSSSSNNNNNNNNSSSSSSTTTTTTTAAAAAIIIIIIIIGGGGEEEEEEEEEIIIIIIIIFFFFFFFFFFFSSSSSSRRRRRRRRRRRLLLLLLLLDDDDDDDDHHHHHHHHHHKKKKKKKKKFFFFFFFFFFFDDDDDDDDLLLLLLLLMMMMMMMMYYYYYYYYYYYYAAAAAKKKKKKKKKRRRRRRRRRRRAAAAAFFFFFFFFFFFVVVVVVVHHHHHHHHHHWWWWWWWWWWWWWWYYYYYYYYYYYYVVVVVVVGGGGEEEEEEEEEGGGGMMMMMMMMEEEEEEEEEEEEEEEEEEGGGGEEEEEEEEEFFFFFFFFFFFSSSSSSEEEEEEEEEAAAAARRRRRRRRRRREEEEEEEEEDDDDDDDDLLLLLLLLAAAAAAAAAALLLLLLLLEEEEEEEEEKKKKKKKKKDDDDDDDDFFFFFFFFFFFEEEEEEEEEEEEEEEEEEVVVVVVVGGGGAAAAAEEEEEEEEESSSSSSAAAAAEEEEEEEEEGGGGAAAAAGGGGEEEEEEEEEGGGGEEEEEEEEEGGGGEEEEEEEEEEEEEEEEEEYYYYYYYYYYYYY

SEQ ID NO: 29 - protein, 3511 aa, Drosophila melanogaster
MMMMMMMMRRRRRRRRRRREEEEEEEEECCCCCCIIIIIIIISSSSSSVVVVVVVHHHHHHHHHHIIIIIIIIGGGGQQQQQQQQQAAAAAGGGGVVVVVVVQQQQQQQQQIIIIIIIIGGGGNNNNNNNNAAAAACCCCCCWWWWWWWWWWWWWWEEEEEEEEELLLLLLLLYYYYYYYYYYYYCCCCCCLLLLLLLLEEEEEEEEEHHHHHHHHHHGGGGIIIIIIIIQQQQQQQQQPPPPPPPDDDDDDDDGGGGHHHHHHHHHHMMMMMMMMPPPPPPPSSSSSSDDDDDDDDKKKKKKKKKTTTTTTTVVVVVVVGGGGGGGGGGGGDDDDDDDDDDDDDDDDSSSSSSFFFFFFFFFFFSSSSSSTTTTTTTFFFFFFFFFFFFFFFFFFFFFFSSSSSSEEEEEEEEETTTTTTTGGGGAAAAAGGGGKKKKKKKKKHHHHHHHHHHVVVVVVVPPPPPPPRRRRRRRRRRRAAAAAVVVVVVVFFFFFFFFFFFVVVVVVVDDDDDDDDLLLLLLLLEEEEEEEEEPPPPPPPTTTTTTTVVVVVVVVVVVVVVDDDDDDDDEEEEEEEEEVVVVVVVRRRRRRRRRRRTTTTTTTGGGGTTTTTTTYYYYYYYYYYYYRRRRRRRRRRRQQQQQQQQQLLLLLLLLFFFFFFFFFFFHHHHHHHHHHPPPPPPPEEEEEEEEEQQQQQQQQQLLLLLLLLIIIIIIIITTTTTTTGGGGKKKKKKKKKEEEEEEEEEDDDDDDDDAAAAAAAAAANNNNNNNNNNNNNNNNYYYYYYYYYYYYAAAAARRRRRRRRRRRGGGGHHHHHHHHHHYYYYYYYYYYYYTTTTTTTIIIIIIIIGGGGKKKKKKKKKEEEEEEEEEIIIIIIIIVVVVVVVDDDDDDDDVVVVVVVVVVVVVVLLLLLLLLDDDDDDDDRRRRRRRRRRRIIIIIIIIRRRRRRRRRRRKKKKKKKKKLLLLLLLLAAAAADDDDDDDDQQQQQQQQQCCCCCCTTTTTTTGGGGLLLLLLLLQQQQQQQQQGGGGFFFFFFFFFFFLLLLLLLLVVVVVVVFFFFFFFFFFFHHHHHHHHHHSSSSSSFFFFFFFFFFFGGGGGGGGGGGGTTTTTTTGGGGSSSSSSGGGGFFFFFFFFFFFTTTTTTTSSSSSSLLLLLLLLLLLLLLLLMMMMMMMMEEEEEEEEERRRRRRRRRRRLLLLLLLLSSSSSSVVVVVVVDDDDDDDDYYYYYYYYYYYYGGGGKKKKKKKKKKKKKKKKKKSSSSSSKKKKKKKKKLLLLLLLLEEEEEEEEEFFFFFFFFFFFSSSSSSIIIIIIIIYYYYYYYYYYYYPPPPPPPAAAAAPPPPPPPQQQQQQQQQVVVVVVVSSSSSSTTTTTTTAAAAAVVVVVVVVVVVVVVEEEEEEEEEPPPPPPPYYYYYYYYYYYYNNNNNNNNSSSSSSIIIIIIIILLLLLLLLTTTTTTTTTTTTTTHHHHHHHHHHTTTTTTTTTTTTTTLLLLLLLLEEEEEEEEEHHHHHHHHHHSSSSSSDDDDDDDDCCCCCCAAAAAFFFFFFFFFFFMMMMMMMMVVVVVVVDDDDDDDDNNNNNNNNEEEEEEEEEAAAAAIIIIIIIIYYYYYYYYYYYYDDDDDDDDIIIIIIIICCCCCCRRRRRRRRRRRRRRRRRRRRRRNNNNNNNNLLLLLLLLDDDDDDDDIIIIIIIIEEEEEEEEERRRRRRRRRRRPPPPPPPTTTTTTTYYYYYYYYYYYYMMMMMMMMNNNNNNNNLLLLLLLLNNNNNNNNRRRRRRRRRRRLLLLLLLLIIIIIIIIGGGGQQQQQQQQQIIIIIIIIVVVVVVVSSSSSSSSSSSSIIIIIIIITTTTTTTAAAAASSSSSSLLLLLLLLRRRRRRRRRRRFFFFFFFFFFFDDDDDDDDGGGGAAAAALLLLLLLLNNNNNNNNVVVVVVVDDDDDDDDLLLLLLLLTTTTTTTEEEEEEEEEFFFFFFFFFFFQQQQQQQQQTTTTTTTNNNNNNNNLLLLLLLLVVVVVVVPPPPPPPYYYYYYYYYYYYPPPPPPPRRRRRRRRRRRIIIIIIIIHHHHHHHHHHFFFFFFFFFFFPPPPPPPLLLLLLLLAAAAATTTTTTTYYYYYYYYYYYYAAAAAPPPPPPPVVVVVVVIIIIIIIISSSSSSVVVVVVVEEEEEEEEEKKKKKKKKKAAAAAYYYYYYYYYYYYHHHHHHHHHHEEEEEEEEEQQQQQQQQQLLLLLLLLTTTTTTTVVVVVVVAAAAAEEEEEEEEEIIIIIIIITTTTTTTNNNNNNNNAAAAACCCCCCFFFFFFFFFFFEEEEEEEEEPPPPPPPAAAAANNNNNNNNQQQQQQQQQMMMMMMMMVVVVVVVKKKKKKKKKCCCCCCDDDDDDDDPPPPPPPRRRRRRRRRRRRRRRRRRRRRRGGGGKKKKKKKKKYYYYYYYYYYYYMMMMMMMMAAAAACCCCCCCCCCCCMMMMMMMMLLLLLLLLYYYYYYYYYYYYRRRRRRRRRRRGGGGDDDDDDDDVVVVVVVVVVVVVVPPPPPPPKKKKKKKKKDDDDDDDDVVVVVVVNNNNNNNNAAAAAAAAAAIIIIIIIIAAAAATTTTTTTIIIIIIIIKKKKKKKKKTTTTTTTKKKKKKKKKRRRRRRRRRRRSSSSSSIIIIIIIIQQQQQQQQQFFFFFFFFFFFVVVVVVVDDDDDDDDWWWWWWWWWWWWWWCCCCCCPPPPPPPTTTTTTTGGGGFFFFFFFFFFFKKKKKKKKKVVVVVVVGGGGIIIIIIIINNNNNNNNYYYYYYYYYYYYQQQQQQQQQPPPPPPPPPPPPPPTTTTTTTVVVVVVVVVVVVVVPPPPPPPGGGGGGGGDDDDDDDDLLLLLLLLAAAAAKKKKKKKKKVVVVVVVQQQQQQQQQRRRRRRRRRRRAAAAAVVVVVVVCCCCCCMMMMMMMMLLLLLLLLSSSSSSNNNNNNNNTTTTTTTTTTTTTTAAAAAIIIIIIIIAAAAAEEEEEEEEEAAAAAWWWWWWWWWWWWWWAAAAARRRRRRRRRRRLLLLLLLLDDDDDDDDHHHHHHHHHHKKKKKKKKKFFFFFFFFFFFDDDDDDDDLLLLLLLLMMMMMMMMYYYYYYYYYYYYAAAAAKKKKKKKKKRRRRRRRRRRRAAAAAFFFFFFFFFFFVVVVVVVHHHHHHHHHHWWWWWWWWWWWWWWYYYYYYYYYYYYVVVVVVVGGGGEEEEEEEEEGGGGMMMMMMMMEEEEEEEEEEEEEEEEEEGGGGEEEEEEEEEFFFFFFFFFFFAAAAAEEEEEEEEEAAAAARRRRRRRRRRREEEEEEEEEDDDDDDDDLLLLLLLLAAAAAAAAAALLLLLLLLEEEEEEEEEKKKKKKKKKDDDDDDDDYYYYYYYYYYYYEEEEEEEEEEEEEEEEEEVVVVVVVGGGGIIIIIIIIDDDDDDDDSSSSSSTTTTTTTTTTTTTTEEEEEEEEELLLLLLLLGGGGEEEEEEEEEDDDDDDDDEEEEEEEEEEEEEEEEEEYYYYYYYYYYYYY

SEQ ID NO: 30 - protein, 3503 aa, Eleusine indica
MMMMMMMMRRRRRRRRRRREEEEEEEEEIIIIIIIIIIIIIIIISSSSSSIIIIIIIIHHHHHHHHHHIIIIIIIIGGGGQQQQQQQQQAAAAAGGGGIIIIIIIIQQQQQQQQQVVVVVVVGGGGNNNNNNNNSSSSSSCCCCCCWWWWWWWWWWWWWWEEEEEEEEELLLLLLLLYYYYYYYYYYYYCCCCCCLLLLLLLLEEEEEEEEEHHHHHHHHHHGGGGIIIIIIIIQQQQQQQQQPPPPPPPDDDDDDDDGGGGLLLLLLLLMMMMMMMMPPPPPPPSSSSSSDDDDDDDDTTTTTTTSSSSSSLLLLLLLLGGGGVVVVVVVAAAAARRRRRRRRRRRDDDDDDDDAAAAAFFFFFFFFFFFNNNNNNNNTTTTTTTFFFFFFFFFFFFFFFFFFFFFFSSSSSSEEEEEEEEETTTTTTTGGGGAAAAAGGGGKKKKKKKKKHHHHHHHHHHVVVVVVVPPPPPPPRRRRRRRRRRRAAAAALLLLLLLLFFFFFFFFFFFVVVVVVVDDDDDDDDLLLLLLLLEEEEEEEEEPPPPPPPTTTTTTTVVVVVVVIIIIIIIIDDDDDDDDEEEEEEEEEVVVVVVVKKKKKKKKKTTTTTTTGGGGPPPPPPPYYYYYYYYYYYYRRRRRRRRRRRQQQQQQQQQLLLLLLLLFFFFFFFFFFFHHHHHHHHHHPPPPPPPEEEEEEEEEQQQQQQQQQLLLLLLLLIIIIIIIISSSSSSYYYYYYYYYYYYKKKKKKKKKEEEEEEEEEDDDDDDDDAAAAAAAAAANNNNNNNNNNNNNNNNFFFFFFFFFFFAAAAARRRRRRRRRRRGGGGHHHHHHHHHHYYYYYYYYYYYYTTTTTTTVVVVVVVGGGGRRRRRRRRRRREEEEEEEEEIIIIIIIIVVVVVVVDDDDDDDDPPPPPPPCCCCCCLLLLLLLLDDDDDDDDRRRRRRRRRRRIIIIIIIIRRRRRRRRRRRKKKKKKKKKLLLLLLLLAAAAADDDDDDDDNNNNNNNNCCCCCCTTTTTTTGGGGLLLLLLLLQQQQQQQQQGGGGFFFFFFFFFFFLLLLLLLLVVVVVVVFFFFFFFFFFFNNNNNNNNAAAAAVVVVVVVGGGGGGGGGGGGTTTTTTTGGGGSSSSSSGGGGLLLLLLLLGGGGSSSSSSLLLLLLLLLLLLLLLLLLLLLLLLEEEEEEEEERRRRRRRRRRRLLLLLLLLSSSSSSVVVVVVVDDDDDDDDYYYYYYYYYYYYGGGGRRRRRRRRRRRKKKKKKKKKSSSSSSKKKKKKKKKLLLLLLLLGGGGFFFFFFFFFFFTTTTTTTIIIIIIIIYYYYYYYYYYYYPPPPPPPSSSSSSPPPPPPPQQQQQQQQQIIIIIIIISSSSSSTTTTTTTAAAAAVVVVVVVVVVVVVVEEEEEEEEEPPPPPPPYYYYYYYYYYYYNNNNNNNNSSSSSSVVVVVVVLLLLLLLLSSSSSSTTTTTTTHHHHHHHHHHSSSSSSLLLLLLLLIIIIIIIIEEEEEEEEEHHHHHHHHHHTTTTTTTDDDDDDDDVVVVVVVVVVVVVVVVVVVVVLLLLLLLLLLLLLLLLDDDDDDDDNNNNNNNNEEEEEEEEEAAAAAIIIIIIIIYYYYYYYYYYYYDDDDDDDDIIIIIIIICCCCCCKKKKKKKKKRRRRRRRRRRRSSSSSSLLLLLLLLDDDDDDDDIIIIIIIIEEEEEEEEERRRRRRRRRRRPPPPPPPTTTTTTTYYYYYYYYYYYYTTTTTTTNNNNNNNNLLLLLLLLNNNNNNNNRRRRRRRRRRRLLLLLLLLIIIIIIIISSSSSSQQQQQQQQQVVVVVVVIIIIIIIISSSSSSSSSSSSLLLLLLLLTTTTTTTTTTTTTTSSSSSSLLLLLLLLRRRRRRRRRRRFFFFFFFFFFFDDDDDDDDGGGGAAAAAIIIIIIIINNNNNNNNVVVVVVVDDDDDDDDIIIIIIIITTTTTTTEEEEEEEEEFFFFFFFFFFFQQQQQQQQQTTTTTTTNNNNNNNNLLLLLLLLVVVVVVVPPPPPPPYYYYYYYYYYYYPPPPPPPRRRRRRRRRRRIIIIIIIIHHHHHHHHHHFFFFFFFFFFFMMMMMMMMLLLLLLLLSSSSSSSSSSSSYYYYYYYYYYYYAAAAAPPPPPPPIIIIIIIIIIIIIIIISSSSSSVVVVVVVEEEEEEEEEKKKKKKKKKAAAAAYYYYYYYYYYYYHHHHHHHHHHEEEEEEEEEQQQQQQQQQHHHHHHHHHHSSSSSSVVVVVVVPPPPPPPEEEEEEEEEIIIIIIIITTTTTTTNNNNNNNNSSSSSSVVVVVVVFFFFFFFFFFFEEEEEEEEESSSSSSSSSSSSSSSSSSVVVVVVVMMMMMMMMAAAAAKKKKKKKKKCCCCCCDDDDDDDDPPPPPPPRRRRRRRRRRRHHHHHHHHHHGGGGKKKKKKKKKYYYYYYYYYYYYMMMMMMMMAAAAACCCCCCCCCCCCLLLLLLLLMMMMMMMMYYYYYYYYYYYYRRRRRRRRRRRGGGGDDDDDDDDVVVVVVVVVVVVVVPPPPPPPKKKKKKKKKDDDDDDDDVVVVVVVNNNNNNNNAAAAAAAAAAVVVVVVVHHHHHHHHHHSSSSSSIIIIIIIIKKKKKKKKKTTTTTTTKKKKKKKKKRRRRRRRRRRRTTTTTTTVVVVVVVQQQQQQQQQFFFFFFFFFFFVVVVVVVDDDDDDDDWWWWWWWWWWWWWWCCCCCCPPPPPPPTTTTTTTGGGGFFFFFFFFFFFKKKKKKKKKCCCCCCGGGGIIIIIIIINNNNNNNNYYYYYYYYYYYYQQQQQQQQQPPPPPPPPPPPPPPTTTTTTTVVVVVVVVVVVVVVPPPPPPPGGGGGGGGDDDDDDDDLLLLLLLLAAAAAKKKKKKKKKVVVVVVVQQQQQQQQQRRRRRRRRRRRAAAAAVVVVVVVCCCCCCMMMMMMMMIIIIIIIISSSSSSNNNNNNNNNNNNNNNNTTTTTTTAAAAAVVVVVVVAAAAAEEEEEEEEEVVVVVVVFFFFFFFFFFFSSSSSSRRRRRRRRRRRIIIIIIIIDDDDDDDDRRRRRRRRRRRKKKKKKKKKFFFFFFFFFFFDDDDDDDDLLLLLLLLMMMMMMMMYYYYYYYYYYYYAAAAAKKKKKKKKKRRRRRRRRRRRAAAAAFFFFFFFFFFFVVVVVVVHHHHHHHHHHWWWWWWWWWWWWWWYYYYYYYYYYYYVVVVVVVGGGGEEEEEEEEEGGGGMMMMMMMMEEEEEEEEEEEEEEEEEEGGGGEEEEEEEEEFFFFFFFFFFFSSSSSSEEEEEEEEEAAAAARRRRRRRRRRREEEEEEEEEDDDDDDDDLLLLLLLLAAAAAAAAAALLLLLLLLEEEEEEEEEKKKKKKKKKDDDDDDDDYYYYYYYYYYYYEEEEEEEEEEEEEEEEEEVVVVVVVGGGGAAAAAEEEEEEEEEVVVVVVVEEEEEEEEEEEEEEEEEEDDDDDDDDDDDDDDDDEEEEEEEEEEEEEEEEEEEEEEEEEEEYYYYYYYYYYYYY

SEQ ID NO: 31 - protein, 3536 aa, Emericella nidulans
MMMMMMMMRRRRRRRRRRRGGGGEEEEEEEEEVVVVVVVCCCCCCHHHHHHHHHHIIIIIIIIHHHHHHHHHHIIIIIIIIGGGGQQQQQQQQQAAAAAGGGGTTTTTTTQQQQQQQQQLLLLLLLLGGGGNNNNNNNNSSSSSSAAAAAWWWWWWWWWWWWWWEEEEEEEEELLLLLLLLYYYYYYYYYYYYLLLLLLLLLLLLLLLLEEEEEEEEEHHHHHHHHHHGGGGLLLLLLLLGGGGAAAAADDDDDDDDGGGGRRRRRRRRRRRLLLLLLLLDDDDDDDDPPPPPPPEEEEEEEEEKKKKKKKKKGGGGEEEEEEEEEDDDDDDDDIIIIIIIINNNNNNNNAAAAAGGGGGGGGSSSSSSFFFFFFFFFFFEEEEEEEEETTTTTTTFFFFFFFFFFFFFFFFFFFFFFTTTTTTTEEEEEEEEETTTTTTTGGGGCCCCCCGGGGKKKKKKKKKYYYYYYYYYYYYVVVVVVVPPPPPPPRRRRRRRRRRRSSSSSSIIIIIIIIFFFFFFFFFFFVVVVVVVDDDDDDDDLLLLLLLLDDDDDDDDPPPPPPPSSSSSSPPPPPPPIIIIIIIIDDDDDDDDEEEEEEEEEIIIIIIIIRRRRRRRRRRRTTTTTTTGGGGPPPPPPPYYYYYYYYYYYYRRRRRRRRRRRQQQQQQQQQLLLLLLLLFFFFFFFFFFFHHHHHHHHHHPPPPPPPEEEEEEEEEQQQQQQQQQLLLLLLLLIIIIIIIISSSSSSGGGGKKKKKKKKKEEEEEEEEEDDDDDDDDAAAAAAAAAANNNNNNNNNNNNNNNNYYYYYYYYYYYYAAAAARRRRRRRRRRRGGGGHHHHHHHHHHYYYYYYYYYYYYTTTTTTTVVVVVVVGGGGKKKKKKKKKEEEEEEEEELLLLLLLLVVVVVVVDDDDDDDDTTTTTTTVVVVVVVVVVVVVVDDDDDDDDRRRRRRRRRRRVVVVVVVRRRRRRRRRRRRRRRRRRRRRRLLLLLLLLSSSSSSDDDDDDDDNNNNNNNNCCCCCCSSSSSSSSSSSSLLLLLLLLQQQQQQQQQGGGGFFFFFFFFFFFLLLLLLLLVVVVVVVFFFFFFFFFFFHHHHHHHHHHSSSSSSFFFFFFFFFFFGGGGGGGGGGGGTTTTTTTGGGGSSSSSSGGGGFFFFFFFFFFFGGGGAAAAALLLLLLLLLLLLLLLLLLLLLLLLEEEEEEEEERRRRRRRRRRRLLLLLLLLSSSSSSTTTTTTTEEEEEEEEEYYYYYYYYYYYYGGGGKKKKKKKKKKKKKKKKKKSSSSSSKKKKKKKKKLLLLLLLLEEEEEEEEEFFFFFFFFFFFAAAAAVVVVVVVYYYYYYYYYYYYPPPPPPPSSSSSSPPPPPPPRRRRRRRRRRRVVVVVVVSSSSSSTTTTTTTAAAAAVVVVVVVVVVVVVVEEEEEEEEEPPPPPPPYYYYYYYYYYYYNNNNNNNNAAAAAVVVVVVVLLLLLLLLSSSSSSTTTTTTTHHHHHHHHHHSSSSSSTTTTTTTLLLLLLLLEEEEEEEEENNNNNNNNSSSSSSDDDDDDDDCCCCCCTTTTTTTFFFFFFFFFFFLLLLLLLLVVVVVVVDDDDDDDDNNNNNNNNEEEEEEEEEAAAAAVVVVVVVYYYYYYYYYYYYDDDDDDDDIIIIIIIICCCCCCRRRRRRRRRRRRRRRRRRRRRRNNNNNNNNLLLLLLLLDDDDDDDDIIIIIIIIPPPPPPPRRRRRRRRRRRPPPPPPPSSSSSSFFFFFFFFFFFEEEEEEEEEHHHHHHHHHHLLLLLLLLNNNNNNNNRRRRRRRRRRRLLLLLLLLIIIIIIIIAAAAAQQQQQQQQQVVVVVVVVVVVVVVSSSSSSSSSSSSIIIIIIIITTTTTTTSSSSSSSSSSSSLLLLLLLLRRRRRRRRRRRFFFFFFFFFFFDDDDDDDDGGGGAAAAALLLLLLLLNNNNNNNNVVVVVVVDDDDDDDDLLLLLLLLNNNNNNNNEEEEEEEEEFFFFFFFFFFFQQQQQQQQQTTTTTTTNNNNNNNNLLLLLLLLVVVVVVVPPPPPPPFFFFFFFFFFFPPPPPPPRRRRRRRRRRRIIIIIIIIHHHHHHHHHHYYYYYYYYYYYYPPPPPPPLLLLLLLLIIIIIIIISSSSSSYYYYYYYYYYYYAAAAAPPPPPPPVVVVVVVIIIIIIIISSSSSSSSSSSSNNNNNNNNRRRRRRRRRRRSSSSSSLLLLLLLLHHHHHHHHHHEEEEEEEEESSSSSSFFFFFFFFFFFKKKKKKKKKVVVVVVVQQQQQQQQQDDDDDDDDLLLLLLLLTTTTTTTLLLLLLLLQQQQQQQQQCCCCCCAAAAAEEEEEEEEEPPPPPPPNNNNNNNNNNNNNNNNQQQQQQQQQMMMMMMMMVVVVVVVRRRRRRRRRRRCCCCCCDDDDDDDDPPPPPPPRRRRRRRRRRRNNNNNNNNGGGGKKKKKKKKKYYYYYYYYYYYYMMMMMMMMAAAAAVVVVVVVAAAAALLLLLLLLLLLLLLLLYYYYYYYYYYYYRRRRRRRRRRRGGGGDDDDDDDDCCCCCCVVVVVVVPPPPPPPRRRRRRRRRRRDDDDDDDDCCCCCCTTTTTTTQQQQQQQQQAAAAAIIIIIIIIAAAAASSSSSSLLLLLLLLKKKKKKKKKAAAAAKKKKKKKKKAAAAASSSSSSFFFFFFFFFFFNNNNNNNNYYYYYYYYYYYYVVVVVVVEEEEEEEEEWWWWWWWWWWWWWWCCCCCCPPPPPPPTTTTTTTGGGGFFFFFFFFFFFKKKKKKKKKVVVVVVVGGGGIIIIIIIINNNNNNNNYYYYYYYYYYYYHHHHHHHHHHKKKKKKKKKPPPPPPPAAAAARRRRRRRRRRRVVVVVVVPPPPPPPGGGGTTTTTTTEEEEEEEEELLLLLLLLAAAAAPPPPPPPVVVVVVVDDDDDDDDRRRRRRRRRRRAAAAAVVVVVVVCCCCCCMMMMMMMMLLLLLLLLSSSSSSNNNNNNNNTTTTTTTTTTTTTTAAAAAIIIIIIIISSSSSSEEEEEEEEEAAAAAWWWWWWWWWWWWWWSSSSSSRRRRRRRRRRRLLLLLLLLDDDDDDDDHHHHHHHHHHKKKKKKKKKFFFFFFFFFFFDDDDDDDDLLLLLLLLMMMMMMMMYYYYYYYYYYYYSSSSSSKKKKKKKKKRRRRRRRRRRRAAAAAFFFFFFFFFFFVVVVVVVHHHHHHHHHHWWWWWWWWWWWWWWYYYYYYYYYYYYVVVVVVVGGGGEEEEEEEEEGGGGMMMMMMMMEEEEEEEEEEEEEEEEEEGGGGEEEEEEEEEFFFFFFFFFFFSSSSSSEEEEEEEEEAAAAARRRRRRRRRRREEEEEEEEEDDDDDDDDLLLLLLLLAAAAAAAAAALLLLLLLLEEEEEEEEEKKKKKKKKKDDDDDDDDYYYYYYYYYYYYEEEEEEEEEEEEEEEEEEVVVVVVVAAAAAGGGGDDDDDDDDSSSSSSLLLLLLLLDDDDDDDDMMMMMMMMEEEEEEEEEGGGGEEEEEEEEEEEEEEEEEEAAAAAEEEEEEEEEYYYYYYYYYYYYY

SEQ ID NO: 32 - protein, 3528 aa, Homarus americanus
MMMMMMMMRRRRRRRRRRREEEEEEEEECCCCCCIIIIIIIISSSSSSIIIIIIIIHHHHHHHHHHVVVVVVVGGGGQQQQQQQQQAAAAAGGGGVVVVVVVQQQQQQQQQMMMMMMMMGGGGNNNNNNNNSSSSSSCCCCCCWWWWWWWWWWWWWWEEEEEEEEELLLLLLLLYYYYYYYYYYYYCCCCCCLLLLLLLLEEEEEEEEEHHHHHHHHHHGGGGIIIIIIIIQQQQQQQQQPPPPPPPDDDDDDDDGGGGQQQQQQQQQMMMMMMMMPPPPPPPSSSSSSDDDDDDDDKKKKKKKKKTTTTTTTVVVVVVVGGGGVVVVVVVCCCCCCNNNNNNNNDDDDDDDDSSSSSSFFFFFFFFFFFNNNNNNNNTTTTTTTFFFFFFFFFFFFFFFFFFFFFFTTTTTTTEEEEEEEEETTTTTTTGGGGSSSSSSGGGGKKKKKKKKKHHHHHHHHHHVVVVVVVPPPPPPPRRRRRRRRRRRAAAAAVVVVVVVFFFFFFFFFFFVVVVVVVDDDDDDDDLLLLLLLLEEEEEEEEEPPPPPPPSSSSSSVVVVVVVIIIIIIIIDDDDDDDDEEEEEEEEEVVVVVVVRRRRRRRRRRRSSSSSSGGGGIIIIIIIIYYYYYYYYYYYYRRRRRRRRRRRQQQQQQQQQLLLLLLLLFFFFFFFFFFFHHHHHHHHHHPPPPPPPEEEEEEEEEQQQQQQQQQLLLLLLLLIIIIIIIISSSSSSGGGGKKKKKKKKKEEEEEEEEEDDDDDDDDAAAAAAAAAANNNNNNNNNNNNNNNNYYYYYYYYYYYYAAAAARRRRRRRRRRRGGGGHHHHHHHHHHYYYYYYYYYYYYTTTTTTTIIIIIIIIGGGGKKKKKKKKKEEEEEEEEEYYYYYYYYYYYYVVVVVVVDDDDDDDDIIIIIIIIVVVVVVVLLLLLLLLDDDDDDDDRRRRRRRRRRRIIIIIIIIRRRRRRRRRRRKKKKKKKKKLLLLLLLLAAAAADDDDDDDDQQQQQQQQQCCCCCCTTTTTTTGGGGLLLLLLLLQQQQQQQQQGGGGFFFFFFFFFFFLLLLLLLLIIIIIIIIFFFFFFFFFFFRRRRRRRRRRRSSSSSSFFFFFFFFFFFGGGGGGGGGGGGTTTTTTTGGGGSSSSSSGGGGFFFFFFFFFFFAAAAASSSSSSLLLLLLLLLLLLLLLLMMMMMMMMEEEEEEEEERRRRRRRRRRRLLLLLLLLSSSSSSVVVVVVVEEEEEEEEEYYYYYYYYYYYYGGGGKKKKKKKKKKKKKKKKKKSSSSSSKKKKKKKKKLLLLLLLLEEEEEEEEEIIIIIIIIAAAAAIIIIIIIIYYYYYYYYYYYYPPPPPPPAAAAAPPPPPPPQQQQQQQQQSSSSSSAAAAATTTTTTTSSSSSSVVVVVVVVVVVVVVEEEEEEEEEPPPPPPPYYYYYYYYYYYYNNNNNNNNSSSSSSIIIIIIIILLLLLLLLTTTTTTTTTTTTTTHHHHHHHHHHTTTTTTTTTTTTTTLLLLLLLLEEEEEEEEEHHHHHHHHHHSSSSSSDDDDDDDDCCCCCCCCCCCCFFFFFFFFFFFMMMMMMMMVVVVVVVDDDDDDDDNNNNNNNNEEEEEEEEEAAAAAIIIIIIIIFFFFFFFFFFFDDDDDDDDIIIIIIIICCCCCCQQQQQQQQQRRRRRRRRRRRNNNNNNNNLLLLLLLLDDDDDDDDVVVVVVVSSSSSSRRRRRRRRRRRPPPPPPPTTTTTTTYYYYYYYYYYYYTTTTTTTNNNNNNNNLLLLLLLLNNNNNNNNRRRRRRRRRRRLLLLLLLLIIIIIIIIGGGGQQQQQQQQQIIIIIIIIVVVVVVVSSSSSSSSSSSSIIIIIIIITTTTTTTAAAAASSSSSSLLLLLLLLRRRRRRRRRRRFFFFFFFFFFFEEEEEEEEEGGGGAAAAALLLLLLLLNNNNNNNNVVVVVVVDDDDDDDDLLLLLLLLTTTTTTTEEEEEEEEEFFFFFFFFFFFQQQQQQQQQTTTTTTTNNNNNNNNLLLLLLLLVVVVVVVPPPPPPPYYYYYYYYYYYYPPPPPPPRRRRRRRRRRRIIIIIIIIHHHHHHHHHHFFFFFFFFFFFPPPPPPPLLLLLLLLTTTTTTTTTTTTTTYYYYYYYYYYYYSSSSSSPPPPPPPIIIIIIIIIIIIIIIISSSSSSAAAAAEEEEEEEEEKKKKKKKKKAAAAAYYYYYYYYYYYYHHHHHHHHHHEEEEEEEEEQQQQQQQQQLLLLLLLLSSSSSSVVVVVVVGGGGEEEEEEEEEIIIIIIIITTTTTTTSSSSSSAAAAACCCCCCFFFFFFFFFFFEEEEEEEEEPPPPPPPAAAAANNNNNNNNQQQQQQQQQMMMMMMMMVVVVVVVKKKKKKKKKCCCCCCDDDDDDDDPPPPPPPRRRRRRRRRRRHHHHHHHHHHGGGGKKKKKKKKKYYYYYYYYYYYYMMMMMMMMAAAAACCCCCCCCCCCCLLLLLLLLLLLLLLLLYYYYYYYYYYYYRRRRRRRRRRRGGGGDDDDDDDDVVVVVVVVVVVVVVPPPPPPPKKKKKKKKKDDDDDDDDVVVVVVVTTTTTTTAAAAASSSSSSIIIIIIIIAAAAANNNNNNNNVVVVVVVKKKKKKKKKTTTTTTTKKKKKKKKKRRRRRRRRRRRTTTTTTTIIIIIIIIQQQQQQQQQFFFFFFFFFFFVVVVVVVDDDDDDDDWWWWWWWWWWWWWWCCCCCCPPPPPPPTTTTTTTGGGGFFFFFFFFFFFKKKKKKKKKVVVVVVVGGGGIIIIIIIINNNNNNNNYYYYYYYYYYYYQQQQQQQQQPPPPPPPPPPPPPPTTTTTTTVVVVVVVVVVVVVVPPPPPPPGGGGAAAAADDDDDDDDLLLLLLLLAAAAAKKKKKKKKKVVVVVVVSSSSSSRRRRRRRRRRRAAAAAVVVVVVVCCCCCCMMMMMMMMLLLLLLLLSSSSSSNNNNNNNNTTTTTTTTTTTTTTAAAAAIIIIIIIIAAAAAEEEEEEEEEAAAAAWWWWWWWWWWWWWWAAAAARRRRRRRRRRRLLLLLLLLDDDDDDDDHHHHHHHHHHKKKKKKKKKVVVVVVVDDDDDDDDLLLLLLLLMMMMMMMMYYYYYYYYYYYYAAAAAKKKKKKKKKRRRRRRRRRRRAAAAAFFFFFFFFFFFVVVVVVVHHHHHHHHHHWWWWWWWWWWWWWWYYYYYYYYYYYYVVVVVVVGGGGEEEEEEEEEGGGGMMMMMMMMEEEEEEEEEEEEEEEEEERRRRRRRRRRRQQQQQQQQQFFFFFFFFFFFSSSSSSEEEEEEEEEAAAAARRRRRRRRRRREEEEEEEEEDDDDDDDDLLLLLLLLAAAAATTTTTTTLLLLLLLLEEEEEEEEEKKKKKKKKKDDDDDDDDYYYYYYYYYYYYEEEEEEEEEEEEEEEEEEVVVVVVVGGGGIIIIIIIIDDDDDDDDTTTTTTTAAAAADDDDDDDDGGGGEEEEEEEEEDDDDDDDDDDDDDDDDEEEEEEEEEEEEEEEEEEAAAAANNNNNNNNDDDDDDDDYYYYYYYYYYYYY

SEQ ID NO: 33 - protein, 3491 aa, Hordeum vulgare
MMMMMMMMRRRRRRRRRRREEEEEEEEECCCCCCIIIIIIIISSSSSSIIIIIIIIHHHHHHHHHHIIIIIIIIGGGGQQQQQQQQQAAAAAGGGGIIIIIIIIQQQQQQQQQVVVVVVVGGGGNNNNNNNNAAAAACCCCCCWWWWWWWWWWWWWWEEEEEEEEELLLLLLLLYYYYYYYYYYYYCCCCCCLLLLLLLLEEEEEEEEEHHHHHHHHHHGGGGIIIIIIIIQQQQQQQQQPPPPPPPDDDDDDDDGGGGQQQQQQQQQMMMMMMMMPPPPPPPGGGGDDDDDDDDKKKKKKKKKTTTTTTTVVVVVVVGGGGGGGGGGGGDDDDDDDDDDDDDDDDAAAAAFFFFFFFFFFFNNNNNNNNTTTTTTTFFFFFFFFFFFFFFFFFFFFFFSSSSSSEEEEEEEEETTTTTTTGGGGAAAAAGGGGKKKKKKKKKHHHHHHHHHHVVVVVVVPPPPPPPRRRRRRRRRRRAAAAAVVVVVVVFFFFFFFFFFFVVVVVVVDDDDDDDDLLLLLLLLEEEEEEEEEPPPPPPPTTTTTTTVVVVVVVIIIIIIIIDDDDDDDDEEEEEEEEEVVVVVVVRRRRRRRRRRRTTTTTTTGGGGAAAAAYYYYYYYYYYYYRRRRRRRRRRRQQQQQQQQQLLLLLLLLFFFFFFFFFFFHHHHHHHHHHPPPPPPPEEEEEEEEEQQQQQQQQQLLLLLLLLIIIIIIIISSSSSSGGGGKKKKKKKKKEEEEEEEEEDDDDDDDDAAAAAAAAAANNNNNNNNNNNNNNNNFFFFFFFFFFFAAAAARRRRRRRRRRRGGGGHHHHHHHHHHYYYYYYYYYYYYTTTTTTTIIIIIIIIGGGGKKKKKKKKKEEEEEEEEEIIIIIIIIVVVVVVVDDDDDDDDLLLLLLLLCCCCCCLLLLLLLLDDDDDDDDRRRRRRRRRRRIIIIIIIIRRRRRRRRRRRKKKKKKKKKLLLLLLLLSSSSSSDDDDDDDDNNNNNNNNCCCCCCTTTTTTTGGGGLLLLLLLLQQQQQQQQQGGGGFFFFFFFFFFFLLLLLLLLVVVVVVVFFFFFFFFFFFNNNNNNNNAAAAAVVVVVVVGGGGGGGGGGGGTTTTTTTGGGGSSSSSSGGGGLLLLLLLLGGGGSSSSSSLLLLLLLLLLLLLLLLLLLLLLLLEEEEEEEEERRRRRRRRRRRLLLLLLLLSSSSSSVVVVVVVDDDDDDDDYYYYYYYYYYYYGGGGKKKKKKKKKKKKKKKKKKSSSSSSKKKKKKKKKLLLLLLLLGGGGFFFFFFFFFFFTTTTTTTVVVVVVVYYYYYYYYYYYYPPPPPPPSSSSSSPPPPPPPQQQQQQQQQVVVVVVVSSSSSSTTTTTTTSSSSSSVVVVVVVVVVVVVVEEEEEEEEEPPPPPPPYYYYYYYYYYYYNNNNNNNNSSSSSSVVVVVVVLLLLLLLLSSSSSSTTTTTTTHHHHHHHHHHSSSSSSLLLLLLLLLLLLLLLLEEEEEEEEEHHHHHHHHHHTTTTTTTDDDDDDDDVVVVVVVSSSSSSIIIIIIIILLLLLLLLLLLLLLLLDDDDDDDDNNNNNNNNEEEEEEEEEAAAAAIIIIIIIIYYYYYYYYYYYYDDDDDDDDIIIIIIIICCCCCCRRRRRRRRRRRRRRRRRRRRRRSSSSSSLLLLLLLLDDDDDDDDIIIIIIIIEEEEEEEEERRRRRRRRRRRPPPPPPPTTTTTTTYYYYYYYYYYYYTTTTTTTNNNNNNNNLLLLLLLLNNNNNNNNRRRRRRRRRRRLLLLLLLLVVVVVVVSSSSSSQQQQQQQQQVVVVVVVIIIIIIIISSSSSSSSSSSSLLLLLLLLTTTTTTTAAAAASSSSSSLLLLLLLLRRRRRRRRRRRFFFFFFFFFFFDDDDDDDDGGGGAAAAALLLLLLLLNNNNNNNNVVVVVVVDDDDDDDDVVVVVVVNNNNNNNNEEEEEEEEEFFFFFFFFFFFQQQQQQQQQTTTTTTTNNNNNNNNLLLLLLLLVVVVVVVPPPPPPPYYYYYYYYYYYYPPPPPPPRRRRRRRRRRRIIIIIIIIHHHHHHHHHHFFFFFFFFFFFMMMMMMMMLLLLLLLLSSSSSSSSSSSSYYYYYYYYYYYYAAAAAPPPPPPPVVVVVVVIIIIIIIISSSSSSAAAAAEEEEEEEEEKKKKKKKKKAAAAAYYYYYYYYYYYYHHHHHHHHHHEEEEEEEEEQQQQQQQQQLLLLLLLLSSSSSSVVVVVVVAAAAAEEEEEEEEEIIIIIIIITTTTTTTNNNNNNNNSSSSSSAAAAAFFFFFFFFFFFEEEEEEEEEPPPPPPPSSSSSSSSSSSSMMMMMMMMMMMMMMMMAAAAAKKKKKKKKKCCCCCCDDDDDDDDPPPPPPPRRRRRRRRRRRHHHHHHHHHHGGGGKKKKKKKKKYYYYYYYYYYYYMMMMMMMMAAAAACCCCCCCCCCCCLLLLLLLLMMMMMMMMYYYYYYYYYYYYRRRRRRRRRRRGGGGDDDDDDDDVVVVVVVVVVVVVVPPPPPPPKKKKKKKKKDDDDDDDDVVVVVVVNNNNNNNNAAAAAAAAAAVVVVVVVAAAAATTTTTTTIIIIIIIIKKKKKKKKKTTTTTTTKKKKKKKKKRRRRRRRRRRRTTTTTTTIIIIIIIIQQQQQQQQQFFFFFFFFFFFVVVVVVVDDDDDDDDWWWWWWWWWWWWWWCCCCCCPPPPPPPTTTTTTTGGGGFFFFFFFFFFFKKKKKKKKKCCCCCCGGGGIIIIIIIINNNNNNNNYYYYYYYYYYYYQQQQQQQQQPPPPPPPPPPPPPPGGGGVVVVVVVVVVVVVVPPPPPPPGGGGGGGGDDDDDDDDLLLLLLLLAAAAAKKKKKKKKKVVVVVVVQQQQQQQQQRRRRRRRRRRRAAAAAVVVVVVVCCCCCCMMMMMMMMIIIIIIIISSSSSSNNNNNNNNSSSSSSTTTTTTTSSSSSSVVVVVVVVVVVVVVEEEEEEEEEVVVVVVVFFFFFFFFFFFSSSSSSRRRRRRRRRRRIIIIIIIIDDDDDDDDHHHHHHHHHHKKKKKKKKKFFFFFFFFFFFDDDDDDDDLLLLLLLLMMMMMMMMYYYYYYYYYYYYAAAAAKKKKKKKKKRRRRRRRRRRRAAAAAFFFFFFFFFFFVVVVVVVHHHHHHHHHHWWWWWWWWWWWWWWYYYYYYYYYYYYVVVVVVVGGGGEEEEEEEEEGGGGMMMMMMMMEEEEEEEEEEEEEEEEEEGGGGEEEEEEEEEFFFFFFFFFFFSSSSSSEEEEEEEEEAAAAARRRRRRRRRRREEEEEEEEEDDDDDDDDLLLLLLLLAAAAAAAAAALLLLLLLLEEEEEEEEEKKKKKKKKKDDDDDDDDYYYYYYYYYYYYEEEEEEEEEEEEEEEEEEVVVVVVVGGGGAAAAAEEEEEEEEEFFFFFFFFFFFDDDDDDDDDDDDDDDDGGGGEEEEEEEEEDDDDDDDDGGGGDDDDDDDDEEEEEEEEEGGGGDDDDDDDDEEEEEEEEEYYYYYYYYYYYYY

SEQ ID NO: 34 - protein, 3512 aa, Homo sapiens
MMMMMMMMRRRRRRRRRRREEEEEEEEECCCCCCIIIIIIIISSSSSSIIIIIIIIHHHHHHHHHHVVVVVVVGGGGQQQQQQQQQAAAAAGGGGVVVVVVVQQQQQQQQQIIIIIIIIGGGGNNNNNNNNAAAAACCCCCCWWWWWWWWWWWWWWEEEEEEEEELLLLLLLLYYYYYYYYYYYYCCCCCCLLLLLLLLEEEEEEEEEHHHHHHHHHHGGGGIIIIIIIIQQQQQQQQQPPPPPPPDDDDDDDDGGGGQQQQQQQQQMMMMMMMMPPPPPPPSSSSSSDDDDDDDDKKKKKKKKKTTTTTTTIIIIIIIIGGGGGGGGGGGGDDDDDDDDDDDDDDDDSSSSSSFFFFFFFFFFFNNNNNNNNTTTTTTTFFFFFFFFFFFFFFFFFFFFFFSSSSSSEEEEEEEEETTTTTTTGGGGAAAAAGGGGKKKKKKKKKHHHHHHHHHHVVVVVVVPPPPPPPRRRRRRRRRRRAAAAAVVVVVVVFFFFFFFFFFFVVVVVVVDDDDDDDDLLLLLLLLEEEEEEEEEPPPPPPPTTTTTTTVVVVVVVVVVVVVVDDDDDDDDEEEEEEEEEVVVVVVVRRRRRRRRRRRTTTTTTTGGGGTTTTTTTYYYYYYYYYYYYRRRRRRRRRRRQQQQQQQQQLLLLLLLLFFFFFFFFFFFHHHHHHHHHHPPPPPPPEEEEEEEEEQQQQQQQQQLLLLLLLLIIIIIIIITTTTTTTGGGGKKKKKKKKKEEEEEEEEEDDDDDDDDAAAAAAAAAANNNNNNNNNNNNNNNNYYYYYYYYYYYYAAAAARRRRRRRRRRRGGGGHHHHHHHHHHYYYYYYYYYYYYTTTTTTTIIIIIIIIGGGGKKKKKKKKKEEEEEEEEEIIIIIIIIVVVVVVVDDDDDDDDLLLLLLLLVVVVVVVLLLLLLLLDDDDDDDDRRRRRRRRRRRIIIIIIIIRRRRRRRRRRRKKKKKKKKKLLLLLLLLAAAAADDDDDDDDLLLLLLLLCCCCCCTTTTTTTGGGGLLLLLLLLQQQQQQQQQGGGGFFFFFFFFFFFLLLLLLLLIIIIIIIIFFFFFFFFFFFHHHHHHHHHHSSSSSSFFFFFFFFFFFGGGGGGGGGGGGTTTTTTTGGGGSSSSSSGGGGFFFFFFFFFFFAAAAASSSSSSLLLLLLLLLLLLLLLLMMMMMMMMEEEEEEEEERRRRRRRRRRRLLLLLLLLSSSSSSVVVVVVVDDDDDDDDYYYYYYYYYYYYGGGGKKKKKKKKKKKKKKKKKKSSSSSSKKKKKKKKKLLLLLLLLEEEEEEEEEFFFFFFFFFFFAAAAAIIIIIIIIYYYYYYYYYYYYPPPPPPPAAAAAPPPPPPPQQQQQQQQQVVVVVVVSSSSSSTTTTTTTAAAAAVVVVVVVVVVVVVVEEEEEEEEEPPPPPPPYYYYYYYYYYYYNNNNNNNNSSSSSSIIIIIIIILLLLLLLLTTTTTTTTTTTTTTHHHHHHHHHHTTTTTTTTTTTTTTLLLLLLLLEEEEEEEEEHHHHHHHHHHSSSSSSDDDDDDDDCCCCCCAAAAAFFFFFFFFFFFMMMMMMMMVVVVVVVDDDDDDDDNNNNNNNNEEEEEEEEEAAAAAIIIIIIIIYYYYYYYYYYYYDDDDDDDDIIIIIIIICCCCCCRRRRRRRRRRRRRRRRRRRRRRNNNNNNNNLLLLLLLLDDDDDDDDIIIIIIIIEEEEEEEEERRRRRRRRRRRPPPPPPPTTTTTTTYYYYYYYYYYYYTTTTTTTNNNNNNNNLLLLLLLLNNNNNNNNRRRRRRRRRRRLLLLLLLLIIIIIIIIGGGGQQQQQQQQQIIIIIIIIVVVVVVVSSSSSSSSSSSSIIIIIIIITTTTTTTAAAAASSSSSSLLLLLLLLRRRRRRRRRRRFFFFFFFFFFFDDDDDDDDGGGGAAAAALLLLLLLLNNNNNNNNVVVVVVVDDDDDDDDLLLLLLLLTTTTTTTEEEEEEEEEFFFFFFFFFFFQQQQQQQQQTTTTTTTNNNNNNNNLLLLLLLLVVVVVVVPPPPPPPYYYYYYYYYYYYPPPPPPPRRRRRRRRRRRIIIIIIIIHHHHHHHHHHFFFFFFFFFFFPPPPPPPLLLLLLLLAAAAATTTTTTTYYYYYYYYYYYYAAAAAPPPPPPPVVVVVVVIIIIIIIISSSSSSAAAAAEEEEEEEEEKKKKKKKKKAAAAAYYYYYYYYYYYYHHHHHHHHHHEEEEEEEEEQQQQQQQQQLLLLLLLLSSSSSSVVVVVVVAAAAAEEEEEEEEEIIIIIIIITTTTTTTNNNNNNNNAAAAACCCCCCFFFFFFFFFFFEEEEEEEEEPPPPPPPAAAAANNNNNNNNQQQQQQQQQMMMMMMMMVVVVVVVKKKKKKKKKCCCCCCDDDDDDDDPPPPPPPRRRRRRRRRRRHHHHHHHHHHGGGGKKKKKKKKKYYYYYYYYYYYYMMMMMMMMAAAAACCCCCCCCCCCCMMMMMMMMLLLLLLLLYYYYYYYYYYYYRRRRRRRRRRRGGGGDDDDDDDDVVVVVVVVVVVVVVPPPPPPPKKKKKKKKKDDDDDDDDVVVVVVVNNNNNNNNAAAAAAAAAAIIIIIIIIAAAAATTTTTTTIIIIIIIIKKKKKKKKKTTTTTTTKKKKKKKKKRRRRRRRRRRRTTTTTTTIIIIIIIIQQQQQQQQQFFFFFFFFFFFVVVVVVVDDDDDDDDWWWWWWWWWWWWWWCCCCCCPPPPPPPTTTTTTTGGGGFFFFFFFFFFFKKKKKKKKKVVVVVVVGGGGIIIIIIIINNNNNNNNYYYYYYYYYYYYQQQQQQQQQPPPPPPPPPPPPPPTTTTTTTVVVVVVVVVVVVVVPPPPPPPGGGGGGGGDDDDDDDDLLLLLLLLAAAAAKKKKKKKKKVVVVVVVQQQQQQQQQRRRRRRRRRRRAAAAAVVVVVVVCCCCCCMMMMMMMMLLLLLLLLSSSSSSNNNNNNNNTTTTTTTTTTTTTTAAAAAIIIIIIIIAAAAAEEEEEEEEEAAAAAWWWWWWWWWWWWWWAAAAARRRRRRRRRRRLLLLLLLLDDDDDDDDHHHHHHHHHHKKKKKKKKKFFFFFFFFFFFDDDDDDDDLLLLLLLLMMMMMMMMYYYYYYYYYYYYAAAAAKKKKKKKKKRRRRRRRRRRRAAAAAFFFFFFFFFFFVVVVVVVHHHHHHHHHHWWWWWWWWWWWWWWYYYYYYYYYYYYVVVVVVVGGGGEEEEEEEEEGGGGMMMMMMMMEEEEEEEEEEEEEEEEEEGGGGEEEEEEEEEFFFFFFFFFFFSSSSSSEEEEEEEEEAAAAARRRRRRRRRRREEEEEEEEEDDDDDDDDLLLLLLLLAAAAAAAAAALLLLLLLLEEEEEEEEEKKKKKKKKKDDDDDDDDYYYYYYYYYYYYEEEEEEEEEEEEEEEEEEVVVVVVVGGGGVVVVVVVDDDDDDDDSSSSSSVVVVVVVEEEEEEEEEAAAAAEEEEEEEEEAAAAAEEEEEEEEEEEEEEEEEEGGGGEEEEEEEEEEEEEEEEEEYYYYYYYYYYYYY

SEQ ID NO: 35 - protein, 3493 aa, Zea mays
MMMMMMMMRRRRRRRRRRREEEEEEEEECCCCCCIIIIIIIISSSSSSIIIIIIIIHHHHHHHHHHIIIIIIIIGGGGQQQQQQQQQAAAAAGGGGIIIIIIIIQQQQQQQQQVVVVVVVGGGGNNNNNNNNAAAAACCCCCCWWWWWWWWWWWWWWEEEEEEEEELLLLLLLLYYYYYYYYYYYYCCCCCCLLLLLLLLEEEEEEEEEHHHHHHHHHHGGGGIIIIIIIIQQQQQQQQQAAAAADDDDDDDDGGGGQQQQQQQQQMMMMMMMMPPPPPPPGGGGDDDDDDDDKKKKKKKKKTTTTTTTIIIIIIIIGGGGGGGGGGGGDDDDDDDDDDDDDDDDAAAAAFFFFFFFFFFFNNNNNNNNTTTTTTTFFFFFFFFFFFFFFFFFFFFFFSSSSSSEEEEEEEEETTTTTTTGGGGAAAAAGGGGKKKKKKKKKHHHHHHHHHHVVVVVVVPPPPPPPRRRRRRRRRRRAAAAAVVVVVVVFFFFFFFFFFFVVVVVVVDDDDDDDDLLLLLLLLEEEEEEEEEPPPPPPPTTTTTTTVVVVVVVIIIIIIIIDDDDDDDDEEEEEEEEEVVVVVVVRRRRRRRRRRRTTTTTTTGGGGTTTTTTTYYYYYYYYYYYYRRRRRRRRRRRQQQQQQQQQLLLLLLLLFFFFFFFFFFFHHHHHHHHHHPPPPPPPEEEEEEEEEQQQQQQQQQLLLLLLLLIIIIIIIISSSSSSGGGGKKKKKKKKKEEEEEEEEEDDDDDDDDAAAAAAAAAANNNNNNNNNNNNNNNNFFFFFFFFFFFAAAAARRRRRRRRRRRGGGGHHHHHHHHHHYYYYYYYYYYYYTTTTTTTIIIIIIIIGGGGKKKKKKKKKEEEEEEEEEIIIIIIIIVVVVVVVDDDDDDDDLLLLLLLLCCCCCCLLLLLLLLDDDDDDDDRRRRRRRRRRRIIIIIIIIRRRRRRRRRRRKKKKKKKKKLLLLLLLLAAAAADDDDDDDDNNNNNNNNCCCCCCTTTTTTTGGGGLLLLLLLLQQQQQQQQQGGGGFFFFFFFFFFFLLLLLLLLVVVVVVVFFFFFFFFFFFNNNNNNNNAAAAAVVVVVVVGGGGGGGGGGGGTTTTTTTGGGGSSSSSSGGGGLLLLLLLLGGGGSSSSSSLLLLLLLLLLLLLLLLLLLLLLLLEEEEEEEEERRRRRRRRRRRLLLLLLLLSSSSSSVVVVVVVDDDDDDDDYYYYYYYYYYYYGGGGKKKKKKKKKKKKKKKKKKSSSSSSKKKKKKKKKLLLLLLLLGGGGFFFFFFFFFFFTTTTTTTVVVVVVVYYYYYYYYYYYYPPPPPPPSSSSSSPPPPPPPQQQQQQQQQVVVVVVVSSSSSSTTTTTTTSSSSSSVVVVVVVVVVVVVVEEEEEEEEEPPPPPPPYYYYYYYYYYYYNNNNNNNNSSSSSSVVVVVVVLLLLLLLLSSSSSSTTTTTTTHHHHHHHHHHSSSSSSLLLLLLLLLLLLLLLLEEEEEEEEEHHHHHHHHHHTTTTTTTDDDDDDDDVVVVVVVAAAAAIIIIIIIILLLLLLLLLLLLLLLLDDDDDDDDNNNNNNNNEEEEEEEEEAAAAAIIIIIIIIYYYYYYYYYYYYDDDDDDDDIIIIIIIICCCCCCRRRRRRRRRRRRRRRRRRRRRRSSSSSSLLLLLLLLDDDDDDDDIIIIIIIIEEEEEEEEERRRRRRRRRRRPPPPPPPTTTTTTTYYYYYYYYYYYYTTTTTTTNNNNNNNNLLLLLLLLNNNNNNNNRRRRRRRRRRRLLLLLLLLVVVVVVVSSSSSSQQQQQQQQQVVVVVVVIIIIIIIISSSSSSSSSSSSLLLLLLLLTTTTTTTAAAAASSSSSSLLLLLLLLRRRRRRRRRRRFFFFFFFFFFFDDDDDDDDGGGGAAAAALLLLLLLLNNNNNNNNVVVVVVVDDDDDDDDVVVVVVVNNNNNNNNEEEEEEEEEFFFFFFFFFFFQQQQQQQQQTTTTTTTNNNNNNNNLLLLLLLLVVVVVVVPPPPPPPYYYYYYYYYYYYPPPPPPPRRRRRRRRRRRIIIIIIIIHHHHHHHHHHFFFFFFFFFFFMMMMMMMMLLLLLLLLSSSSSSSSSSSSYYYYYYYYYYYYAAAAAPPPPPPPVVVVVVVIIIIIIIISSSSSSAAAAAEEEEEEEEEKKKKKKKKKAAAAAYYYYYYYYYYYYHHHHHHHHHHEEEEEEEEEQQQQQQQQQLLLLLLLLSSSSSSVVVVVVVAAAAAEEEEEEEEEIIIIIIIITTTTTTTNNNNNNNNSSSSSSAAAAAFFFFFFFFFFFEEEEEEEEEPPPPPPPSSSSSSSSSSSSMMMMMMMMMMMMMMMMAAAAAKKKKKKKKKCCCCCCDDDDDDDDPPPPPPPRRRRRRRRRRRHHHHHHHHHHGGGGKKKKKKKKKYYYYYYYYYYYYMMMMMMMMAAAAACCCCCCCCCCCCLLLLLLLLMMMMMMMMYYYYYYYYYYYYRRRRRRRRRRRGGGGDDDDDDDDVVVVVVVVVVVVVVPPPPPPPKKKKKKKKKDDDDDDDDVVVVVVVNNNNNNNNAAAAAAAAAAVVVVVVVAAAAATTTTTTTIIIIIIIIKKKKKKKKKTTTTTTTKKKKKKKKKRRRRRRRRRRRTTTTTTTIIIIIIIIQQQQQQQQQFFFFFFFFFFFVVVVVVVDDDDDDDDWWWWWWWWWWWWWWCCCCCCPPPPPPPTTTTTTTGGGGFFFFFFFFFFFKKKKKKKKKCCCCCCGGGGIIIIIIIINNNNNNNNYYYYYYYYYYYYQQQQQQQQQPPPPPPPPPPPPPPSSSSSSVVVVVVVVVVVVVVPPPPPPPGGGGGGGGDDDDDDDDLLLLLLLLAAAAAKKKKKKKKKVVVVVVVQQQQQQQQQRRRRRRRRRRRAAAAAVVVVVVVCCCCCCMMMMMMMMIIIIIIIISSSSSSNNNNNNNNSSSSSSTTTTTTTSSSSSSVVVVVVVVVVVVVVEEEEEEEEEVVVVVVVFFFFFFFFFFFSSSSSSRRRRRRRRRRRIIIIIIIIDDDDDDDDHHHHHHHHHHKKKKKKKKKFFFFFFFFFFFDDDDDDDDLLLLLLLLMMMMMMMMYYYYYYYYYYYYAAAAAKKKKKKKKKRRRRRRRRRRRAAAAAFFFFFFFFFFFVVVVVVVHHHHHHHHHHWWWWWWWWWWWWWWYYYYYYYYYYYYVVVVVVVGGGGEEEEEEEEEGGGGMMMMMMMMEEEEEEEEEEEEEEEEEEGGGGEEEEEEEEEFFFFFFFFFFFSSSSSSEEEEEEEEEAAAAARRRRRRRRRRREEEEEEEEEDDDDDDDDLLLLLLLLAAAAAAAAAALLLLLLLLEEEEEEEEEKKKKKKKKKDDDDDDDDYYYYYYYYYYYYEEEEEEEEEEEEEEEEEEVVVVVVVGGGGAAAAAEEEEEEEEEFFFFFFFFFFFDDDDDDDDEEEEEEEEEGGGGEEEEEEEEEEEEEEEEEEGGGGDDDDDDDDDDDDDDDDGGGGDDDDDDDDEEEEEEEEEYYYYYYYYYYYYY

SEQ ID NO: 36 - protein, 3526 aa, Mus musculus
MMMMMMMMRRRRRRRRRRREEEEEEEEECCCCCCIIIIIIIISSSSSSIIIIIIIIHHHHHHHHHHVVVVVVVGGGGQQQQQQQQQAAAAAGGGGVVVVVVVQQQQQQQQQIIIIIIIIGGGGNNNNNNNNAAAAACCCCCCWWWWWWWWWWWWWWEEEEEEEEELLLLLLLLYYYYYYYYYYYYCCCCCCLLLLLLLLEEEEEEEEEHHHHHHHHHHGGGGIIIIIIIIQQQQQQQQQPPPPPPPDDDDDDDDGGGGQQQQQQQQQMMMMMMMMPPPPPPPSSSSSSDDDDDDDDKKKKKKKKKTTTTTTTIIIIIIIIGGGGGGGGGGGGDDDDDDDDDDDDDDDDSSSSSSFFFFFFFFFFFNNNNNNNNTTTTTTTFFFFFFFFFFFFFFFFFFFFFFSSSSSSEEEEEEEEETTTTTTTGGGGAAAAAGGGGKKKKKKKKKHHHHHHHHHHVVVVVVVPPPPPPPRRRRRRRRRRRAAAAAVVVVVVVFFFFFFFFFFFVVVVVVVDDDDDDDDLLLLLLLLEEEEEEEEEPPPPPPPTTTTTTTVVVVVVVIIIIIIIIDDDDDDDDEEEEEEEEEVVVVVVVRRRRRRRRRRRTTTTTTTGGGGTTTTTTTYYYYYYYYYYYYRRRRRRRRRRRQQQQQQQQQLLLLLLLLFFFFFFFFFFFHHHHHHHHHHPPPPPPPEEEEEEEEEQQQQQQQQQLLLLLLLLIIIIIIIITTTTTTTGGGGKKKKKKKKKEEEEEEEEEDDDDDDDDAAAAAAAAAANNNNNNNNNNNNNNNNYYYYYYYYYYYYAAAAARRRRRRRRRRRGGGGHHHHHHHHHHYYYYYYYYYYYYTTTTTTTIIIIIIIIGGGGKKKKKKKKKEEEEEEEEEIIIIIIIIIIIIIIIIDDDDDDDDLLLLLLLLVVVVVVVLLLLLLLLDDDDDDDDRRRRRRRRRRRIIIIIIIIRRRRRRRRRRRKKKKKKKKKLLLLLLLLAAAAADDDDDDDDQQQQQQQQQCCCCCCTTTTTTTGGGGLLLLLLLLQQQQQQQQQGGGGFFFFFFFFFFFLLLLLLLLVVVVVVVFFFFFFFFFFFHHHHHHHHHHSSSSSSFFFFFFFFFFFGGGGGGGGGGGGTTTTTTTGGGGSSSSSSGGGGFFFFFFFFFFFTTTTTTTSSSSSSLLLLLLLLLLLLLLLLMMMMMMMMEEEEEEEEERRRRRRRRRRRLLLLLLLLSSSSSSVVVVVVVDDDDDDDDYYYYYYYYYYYYGGGGKKKKKKKKKKKKKKKKKKSSSSSSKKKKKKKKKLLLLLLLLEEEEEEEEEFFFFFFFFFFFSSSSSSIIIIIIIIYYYYYYYYYYYYPPPPPPPAAAAAPPPPPPPQQQQQQQQQVVVVVVVSSSSSSTTTTTTTAAAAAVVVVVVVVVVVVVVEEEEEEEEEPPPPPPPYYYYYYYYYYYYNNNNNNNNSSSSSSIIIIIIIILLLLLLLLTTTTTTTTTTTTTTHHHHHHHHHHTTTTTTTTTTTTTTLLLLLLLLEEEEEEEEEHHHHHHHHHHSSSSSSDDDDDDDDCCCCCCAAAAAFFFFFFFFFFFMMMMMMMMVVVVVVVDDDDDDDDNNNNNNNNEEEEEEEEEAAAAAIIIIIIIIYYYYYYYYYYYYDDDDDDDDIIIIIIIICCCCCCRRRRRRRRRRRRRRRRRRRRRRNNNNNNNNLLLLLLLLDDDDDDDDIIIIIIIIEEEEEEEEERRRRRRRRRRRPPPPPPPTTTTTTTYYYYYYYYYYYYTTTTTTTNNNNNNNNLLLLLLLLNNNNNNNNRRRRRRRRRRRLLLLLLLLIIIIIIIISSSSSSQQQQQQQQQIIIIIIIIVVVVVVVSSSSSSSSSSSSIIIIIIIITTTTTTTAAAAASSSSSSLLLLLLLLRRRRRRRRRRRFFFFFFFFFFFDDDDDDDDGGGGAAAAALLLLLLLLNNNNNNNNVVVVVVVDDDDDDDDLLLLLLLLTTTTTTTEEEEEEEEEFFFFFFFFFFFQQQQQQQQQTTTTTTTNNNNNNNNLLLLLLLLVVVVVVVPPPPPPPYYYYYYYYYYYYPPPPPPPRRRRRRRRRRRIIIIIIIIHHHHHHHHHHFFFFFFFFFFFPPPPPPPLLLLLLLLAAAAATTTTTTTYYYYYYYYYYYYAAAAAPPPPPPPVVVVVVVIIIIIIIISSSSSSAAAAAEEEEEEEEEKKKKKKKKKAAAAAYYYYYYYYYYYYHHHHHHHHHHEEEEEEEEEQQQQQQQQQLLLLLLLLSSSSSSVVVVVVVAAAAAEEEEEEEEEIIIIIIIITTTTTTTNNNNNNNNAAAAACCCCCCFFFFFFFFFFFEEEEEEEEEPPPPPPPAAAAANNNNNNNNQQQQQQQQQMMMMMMMMVVVVVVVKKKKKKKKKCCCCCCDDDDDDDDPPPPPPPRRRRRRRRRRRHHHHHHHHHHGGGGKKKKKKKKKYYYYYYYYYYYYMMMMMMMMAAAAACCCCCCCCCCCCLLLLLLLLLLLLLLLLYYYYYYYYYYYYRRRRRRRRRRRGGGGDDDDDDDDVVVVVVVVVVVVVVPPPPPPPKKKKKKKKKDDDDDDDDVVVVVVVNNNNNNNNAAAAAAAAAAIIIIIIIIAAAAATTTTTTTIIIIIIIIKKKKKKKKKTTTTTTTKKKKKKKKKRRRRRRRRRRRTTTTTTTIIIIIIIIQQQQQQQQQFFFFFFFFFFFVVVVVVVDDDDDDDDWWWWWWWWWWWWWWCCCCCCPPPPPPPTTTTTTTGGGGFFFFFFFFFFFKKKKKKKKKVVVVVVVGGGGIIIIIIIINNNNNNNNYYYYYYYYYYYYQQQQQQQQQPPPPPPPPPPPPPPTTTTTTTVVVVVVVVVVVVVVPPPPPPPGGGGGGGGDDDDDDDDLLLLLLLLAAAAAKKKKKKKKKVVVVVVVQQQQQQQQQRRRRRRRRRRRAAAAAVVVVVVVCCCCCCMMMMMMMMLLLLLLLLSSSSSSNNNNNNNNTTTTTTTTTTTTTTAAAAAIIIIIIIIAAAAAEEEEEEEEEAAAAAWWWWWWWWWWWWWWAAAAARRRRRRRRRRRLLLLLLLLDDDDDDDDHHHHHHHHHHKKKKKKKKKFFFFFFFFFFFDDDDDDDDLLLLLLLLMMMMMMMMYYYYYYYYYYYYAAAAAKKKKKKKKKRRRRRRRRRRRAAAAAFFFFFFFFFFFVVVVVVVHHHHHHHHHHWWWWWWWWWWWWWWYYYYYYYYYYYYVVVVVVVGGGGEEEEEEEEEGGGGMMMMMMMMEEEEEEEEEEEEEEEEEEGGGGEEEEEEEEEFFFFFFFFFFFSSSSSSEEEEEEEEEAAAAARRRRRRRRRRREEEEEEEEEDDDDDDDDMMMMMMMMAAAAAAAAAALLLLLLLLEEEEEEEEEKKKKKKKKKDDDDDDDDYYYYYYYYYYYYEEEEEEEEEEEEEEEEEEVVVVVVVGGGGVVVVVVVDDDDDDDDSSSSSSVVVVVVVEEEEEEEEEGGGGEEEEEEEEEGGGGEEEEEEEEEEEEEEEEEEEEEEEEEEEGGGGEEEEEEEEEEEEEEEEEEYYYYYYYYYYYYY

SEQ ID NO: 37 - protein, 3529 aa, Neurospora crassa
MMMMMMMMRRRRRRRRRRREEEEEEEEEIIIIIIIIIIIIIIIISSSSSSLLLLLLLLNNNNNNNNVVVVVVVGGGGQQQQQQQQQAAAAAGGGGCCCCCCQQQQQQQQQIIIIIIIIAAAAANNNNNNNNSSSSSSCCCCCCWWWWWWWWWWWWWWEEEEEEEEELLLLLLLLYYYYYYYYYYYYCCCCCCLLLLLLLLEEEEEEEEEHHHHHHHHHHGGGGIIIIIIIIQQQQQQQQQPPPPPPPDDDDDDDDGGGGYYYYYYYYYYYYLLLLLLLLTTTTTTTEEEEEEEEEEEEEEEEEERRRRRRRRRRRKKKKKKKKKAAAAAAAAAADDDDDDDDPPPPPPPDDDDDDDDHHHHHHHHHHGGGGFFFFFFFFFFFSSSSSSTTTTTTTFFFFFFFFFFFFFFFFFFFFFFSSSSSSEEEEEEEEETTTTTTTGGGGNNNNNNNNGGGGNNNNNNNNTTTTTTTFFFFFFFFFFFPPPPPPPRRRRRRRRRRRTTTTTTTIIIIIIIIYYYYYYYYYYYYAAAAADDDDDDDDLLLLLLLLEEEEEEEEEPPPPPPPNNNNNNNNVVVVVVVIIIIIIIIDDDDDDDDEEEEEEEEEVVVVVVVRRRRRRRRRRRTTTTTTTGGGGAAAAAYYYYYYYYYYYYRRRRRRRRRRRGGGGLLLLLLLLFFFFFFFFFFFHHHHHHHHHHPPPPPPPEEEEEEEEEHHHHHHHHHHMMMMMMMMIIIIIIIISSSSSSGGGGKKKKKKKKKEEEEEEEEEDDDDDDDDAAAAASSSSSSNNNNNNNNNNNNNNNNYYYYYYYYYYYYAAAAARRRRRRRRRRRGGGGHHHHHHHHHHYYYYYYYYYYYYTTTTTTTVVVVVVVGGGGKKKKKKKKKEEEEEEEEELLLLLLLLIIIIIIIIDDDDDDDDQQQQQQQQQVVVVVVVLLLLLLLLDDDDDDDDKKKKKKKKKVVVVVVVRRRRRRRRRRRRRRRRRRRRRRVVVVVVVAAAAADDDDDDDDNNNNNNNNCCCCCCSSSSSSGGGGLLLLLLLLQQQQQQQQQGGGGFFFFFFFFFFFLLLLLLLLVVVVVVVFFFFFFFFFFFHHHHHHHHHHSSSSSSFFFFFFFFFFFGGGGGGGGGGGGTTTTTTTGGGGSSSSSSGGGGFFFFFFFFFFFGGGGAAAAALLLLLLLLLLLLLLLLMMMMMMMMEEEEEEEEERRRRRRRRRRRLLLLLLLLSSSSSSVVVVVVVDDDDDDDDYYYYYYYYYYYYGGGGKKKKKKKKKKKKKKKKKKSSSSSSKKKKKKKKKLLLLLLLLEEEEEEEEEFFFFFFFFFFFCCCCCCVVVVVVVYYYYYYYYYYYYPPPPPPPAAAAAPPPPPPPQQQQQQQQQTTTTTTTAAAAATTTTTTTSSSSSSVVVVVVVVVVVVVVEEEEEEEEEPPPPPPPYYYYYYYYYYYYNNNNNNNNSSSSSSIIIIIIIILLLLLLLLTTTTTTTTTTTTTTHHHHHHHHHHTTTTTTTTTTTTTTLLLLLLLLEEEEEEEEEQQQQQQQQQRRRRRRRRRRRRRRRRRRRRRRDDDDDDDDCCCCCCSSSSSSFFFFFFFFFFFMMMMMMMMVVVVVVVDDDDDDDDNNNNNNNNEEEEEEEEEAAAAAIIIIIIIIYYYYYYYYYYYYDDDDDDDDIIIIIIIICCCCCCRRRRRRRRRRRRRRRRRRRRRRNNNNNNNNLLLLLLLLGGGGLLLLLLLLEEEEEEEEERRRRRRRRRRRPPPPPPPNNNNNNNNYYYYYYYYYYYYEEEEEEEEENNNNNNNNLLLLLLLLNNNNNNNNRRRRRRRRRRRLLLLLLLLIIIIIIIIAAAAAQQQQQQQQQVVVVVVVVVVVVVVSSSSSSSSSSSSIIIIIIIITTTTTTTAAAAASSSSSSLLLLLLLLRRRRRRRRRRRFFFFFFFFFFFDDDDDDDDGGGGSSSSSSLLLLLLLLNNNNNNNNVVVVVVVDDDDDDDDLLLLLLLLNNNNNNNNEEEEEEEEEFFFFFFFFFFFQQQQQQQQQTTTTTTTNNNNNNNNLLLLLLLLVVVVVVVPPPPPPPYYYYYYYYYYYYPPPPPPPRRRRRRRRRRRIIIIIIIIHHHHHHHHHHFFFFFFFFFFFPPPPPPPLLLLLLLLVVVVVVVAAAAAYYYYYYYYYYYYAAAAAPPPPPPPVVVVVVVIIIIIIIISSSSSSAAAAAAAAAAKKKKKKKKKAAAAAAAAAAHHHHHHHHHHEEEEEEEEEAAAAANNNNNNNNSSSSSSVVVVVVVQQQQQQQQQEEEEEEEEEMMMMMMMMTTTTTTTMMMMMMMMSSSSSSCCCCCCFFFFFFFFFFFEEEEEEEEEPPPPPPPNNNNNNNNNNNNNNNNQQQQQQQQQMMMMMMMMVVVVVVVKKKKKKKKKCCCCCCDDDDDDDDPPPPPPPRRRRRRRRRRRHHHHHHHHHHGGGGKKKKKKKKKYYYYYYYYYYYYMMMMMMMMAAAAATTTTTTTCCCCCCLLLLLLLLLLLLLLLLYYYYYYYYYYYYRRRRRRRRRRRGGGGDDDDDDDDVVVVVVVVVVVVVVPPPPPPPNNNNNNNNDDDDDDDDAAAAAHHHHHHHHHHAAAAAAAAAAVVVVVVVAAAAATTTTTTTLLLLLLLLKKKKKKKKKTTTTTTTKKKKKKKKKRRRRRRRRRRRTTTTTTTIIIIIIIIQQQQQQQQQFFFFFFFFFFFVVVVVVVDDDDDDDDWWWWWWWWWWWWWWCCCCCCPPPPPPPTTTTTTTGGGGFFFFFFFFFFFKKKKKKKKKLLLLLLLLGGGGIIIIIIIICCCCCCYYYYYYYYYYYYQQQQQQQQQPPPPPPPPPPPPPPHHHHHHHHHHQQQQQQQQQVVVVVVVPPPPPPPNNNNNNNNGGGGRRRRRRRRRRRSSSSSSGGGGPPPPPPPRRRRRRRRRRRLLLLLLLLTTTTTTTDDDDDDDDAAAAAVVVVVVVCCCCCCMMMMMMMMLLLLLLLLSSSSSSNNNNNNNNTTTTTTTTTTTTTTAAAAAIIIIIIIIAAAAAEEEEEEEEEAAAAAWWWWWWWWWWWWWWSSSSSSAAAAASSSSSSFFFFFFFFFFFVVVVVVVQQQQQQQQQVVVVVVVDDDDDDDDLLLLLLLLMMMMMMMMYYYYYYYYYYYYSSSSSSKKKKKKKKKRRRRRRRRRRRAAAAAFFFFFFFFFFFVVVVVVVHHHHHHHHHHWWWWWWWWWWWWWWYYYYYYYYYYYYVVVVVVVGGGGEEEEEEEEEGGGGMMMMMMMMEEEEEEEEEEEEEEEEEEGGGGEEEEEEEEEFFFFFFFFFFFSSSSSSEEEEEEEEEAAAAARRRRRRRRRRREEEEEEEEEDDDDDDDDLLLLLLLLAAAAAAAAAALLLLLLLLEEEEEEEEERRRRRRRRRRRDDDDDDDDYYYYYYYYYYYYEEEEEEEEEEEEEEEEEEVVVVVVVAAAAAAAAAADDDDDDDDSSSSSSMMMMMMMMEEEEEEEEEGGGGEEEEEEEEEDDDDDDDDVVVVVVVEEEEEEEEEAAAAAEEEEEEEEEYYYYYYYYYYYYY

SEQ ID NO: 38 - protein, 3528 aa, Patella vulgata
MMMMMMMMRRRRRRRRRRREEEEEEEEECCCCCCIIIIIIIISSSSSSVVVVVVVHHHHHHHHHHIIIIIIIIGGGGQQQQQQQQQAAAAAGGGGVVVVVVVQQQQQQQQQMMMMMMMMGGGGNNNNNNNNAAAAACCCCCCWWWWWWWWWWWWWWEEEEEEEEELLLLLLLLYYYYYYYYYYYYCCCCCCLLLLLLLLEEEEEEEEEHHHHHHHHHHGGGGIIIIIIIIQQQQQQQQQPPPPPPPDDDDDDDDGGGGQQQQQQQQQMMMMMMMMPPPPPPPSSSSSSDDDDDDDDKKKKKKKKKTTTTTTTIIIIIIIIGGGGGGGGGGGGDDDDDDDDDDDDDDDDSSSSSSFFFFFFFFFFFNNNNNNNNTTTTTTTFFFFFFFFFFFFFFFFFFFFFFSSSSSSEEEEEEEEETTTTTTTGGGGAAAAAGGGGKKKKKKKKKHHHHHHHHHHVVVVVVVPPPPPPPRRRRRRRRRRRAAAAAVVVVVVVFFFFFFFFFFFVVVVVVVDDDDDDDDLLLLLLLLEEEEEEEEEPPPPPPPTTTTTTTVVVVVVVVVVVVVVDDDDDDDDEEEEEEEEEVVVVVVVRRRRRRRRRRRTTTTTTTGGGGTTTTTTTYYYYYYYYYYYYRRRRRRRRRRRQQQQQQQQQLLLLLLLLFFFFFFFFFFFHHHHHHHHHHPPPPPPPEEEEEEEEEQQQQQQQQQLLLLLLLLIIIIIIIITTTTTTTGGGGKKKKKKKKKEEEEEEEEEDDDDDDDDAAAAAAAAAANNNNNNNNNNNNNNNNYYYYYYYYYYYYAAAAARRRRRRRRRRRGGGGHHHHHHHHHHYYYYYYYYYYYYTTTTTTTVVVVVVVGGGGKKKKKKKKKEEEEEEEEEIIIIIIIIIIIIIIIIDDDDDDDDLLLLLLLLVVVVVVVLLLLLLLLDDDDDDDDRRRRRRRRRRRIIIIIIIIRRRRRRRRRRRKKKKKKKKKLLLLLLLLAAAAADDDDDDDDQQQQQQQQQCCCCCCTTTTTTTGGGGLLLLLLLLQQQQQQQQQGGGGFFFFFFFFFFFLLLLLLLLIIIIIIIIFFFFFFFFFFFHHHHHHHHHHSSSSSSFFFFFFFFFFFGGGGGGGGGGGGTTTTTTTGGGGSSSSSSGGGGFFFFFFFFFFFSSSSSSSSSSSSLLLLLLLLLLLLLLLLMMMMMMMMEEEEEEEEERRRRRRRRRRRLLLLLLLLSSSSSSVVVVVVVDDDDDDDDYYYYYYYYYYYYGGGGKKKKKKKKKKKKKKKKKKSSSSSSKKKKKKKKKLLLLLLLLEEEEEEEEEFFFFFFFFFFFAAAAAIIIIIIIIYYYYYYYYYYYYPPPPPPPAAAAAPPPPPPPQQQQQQQQQIIIIIIIISSSSSSTTTTTTTAAAAAVVVVVVVVVVVVVVEEEEEEEEEPPPPPPPYYYYYYYYYYYYNNNNNNNNSSSSSSIIIIIIIILLLLLLLLTTTTTTTTTTTTTTHHHHHHHHHHTTTTTTTTTTTTTTLLLLLLLLEEEEEEEEEHHHHHHHHHHSSSSSSDDDDDDDDCCCCCCAAAAAFFFFFFFFFFFMMMMMMMMVVVVVVVDDDDDDDDNNNNNNNNEEEEEEEEEAAAAAIIIIIIIIYYYYYYYYYYYYDDDDDDDDIIIIIIIICCCCCCRRRRRRRRRRRRRRRRRRRRRRNNNNNNNNLLLLLLLLDDDDDDDDIIIIIIIIEEEEEEEEERRRRRRRRRRRPPPPPPPTTTTTTTYYYYYYYYYYYYTTTTTTTNNNNNNNNLLLLLLLLNNNNNNNNRRRRRRRRRRRLLLLLLLLIIIIIIIIGGGGQQQQQQQQQIIIIIIIIVVVVVVVSSSSSSSSSSSSIIIIIIIITTTTTTTAAAAASSSSSSLLLLLLLLRRRRRRRRRRRFFFFFFFFFFFDDDDDDDDGGGGAAAAALLLLLLLLNNNNNNNNVVVVVVVDDDDDDDDLLLLLLLLTTTTTTTEEEEEEEEEFFFFFFFFFFFQQQQQQQQQTTTTTTTNNNNNNNNLLLLLLLLVVVVVVVPPPPPPPYYYYYYYYYYYYPPPPPPPRRRRRRRRRRRIIIIIIIIHHHHHHHHHHFFFFFFFFFFFPPPPPPPLLLLLLLLAAAAATTTTTTTYYYYYYYYYYYYAAAAAPPPPPPPVVVVVVVIIIIIIIISSSSSSAAAAAEEEEEEEEEKKKKKKKKKAAAAAYYYYYYYYYYYYHHHHHHHHHHEEEEEEEEEQQQQQQQQQLLLLLLLLTTTTTTTVVVVVVVAAAAAEEEEEEEEEIIIIIIIITTTTTTTNNNNNNNNAAAAACCCCCCFFFFFFFFFFFEEEEEEEEEPPPPPPPAAAAANNNNNNNNQQQQQQQQQMMMMMMMMVVVVVVVKKKKKKKKKCCCCCCDDDDDDDDPPPPPPPRRRRRRRRRRRHHHHHHHHHHGGGGKKKKKKKKKYYYYYYYYYYYYMMMMMMMMSSSSSSCCCCCCCCCCCCMMMMMMMMLLLLLLLLYYYYYYYYYYYYRRRRRRRRRRRGGGGDDDDDDDDVVVVVVVVVVVVVVPPPPPPPKKKKKKKKKDDDDDDDDVVVVVVVNNNNNNNNAAAAAAAAAAIIIIIIIIAAAAATTTTTTTIIIIIIIIKKKKKKKKKTTTTTTTKKKKKKKKKRRRRRRRRRRRTTTTTTTIIIIIIIIQQQQQQQQQFFFFFFFFFFFVVVVVVVDDDDDDDDWWWWWWWWWWWWWWCCCCCCPPPPPPPTTTTTTTGGGGFFFFFFFFFFFKKKKKKKKKVVVVVVVGGGGIIIIIIIINNNNNNNNYYYYYYYYYYYYQQQQQQQQQPPPPPPPPPPPPPPTTTTTTTVVVVVVVVVVVVVVPPPPPPPGGGGGGGGDDDDDDDDLLLLLLLLAAAAAKKKKKKKKKVVVVVVVQQQQQQQQQRRRRRRRRRRRAAAAAVVVVVVVCCCCCCMMMMMMMMLLLLLLLLSSSSSSNNNNNNNNTTTTTTTTTTTTTTAAAAAIIIIIIIIAAAAAEEEEEEEEEAAAAAWWWWWWWWWWWWWWAAAAARRRRRRRRRRRLLLLLLLLDDDDDDDDHHHHHHHHHHKKKKKKKKKFFFFFFFFFFFDDDDDDDDLLLLLLLLMMMMMMMMYYYYYYYYYYYYAAAAAKKKKKKKKKRRRRRRRRRRRAAAAAFFFFFFFFFFFVVVVVVVHHHHHHHHHHWWWWWWWWWWWWWWYYYYYYYYYYYYVVVVVVVGGGGEEEEEEEEEGGGGMMMMMMMMEEEEEEEEEEEEEEEEEEGGGGEEEEEEEEEFFFFFFFFFFFSSSSSSEEEEEEEEEAAAAARRRRRRRRRRREEEEEEEEEDDDDDDDDLLLLLLLLAAAAAAAAAALLLLLLLLEEEEEEEEEKKKKKKKKKDDDDDDDDYYYYYYYYYYYYEEEEEEEEEEEEEEEEEEVVVVVVVGGGGVVVVVVVDDDDDDDDSSSSSSVVVVVVVEEEEEEEEEGGGGEEEEEEEEEGGGGEEEEEEEEEEEEEEEEEEEEEEEEEEEGGGGGGGGEEEEEEEEEEEEEEEEEEYYYYYYYYYYYYY

SEQ ID NO: 39 - protein, 3508 aa, Pelvetia fastigiata
MMMMMMMMRRRRRRRRRRREEEEEEEEECCCCCCIIIIIIIISSSSSSIIIIIIIIHHHHHHHHHHIIIIIIIIGGGGQQQQQQQQQAAAAAGGGGIIIIIIIIQQQQQQQQQTTTTTTTGGGGNNNNNNNNAAAAACCCCCCWWWWWWWWWWWWWWEEEEEEEEELLLLLLLLYYYYYYYYYYYYCCCCCCLLLLLLLLEEEEEEEEEHHHHHHHHHHGGGGIIIIIIIIQQQQQQQQQPPPPPPPDDDDDDDDGGGGQQQQQQQQQMMMMMMMMPPPPPPPSSSSSSDDDDDDDDKKKKKKKKKTTTTTTTIIIIIIIIGGGGGGGGGGGGDDDDDDDDDDDDDDDDAAAAAFFFFFFFFFFFNNNNNNNNTTTTTTTFFFFFFFFFFFFFFFFFFFFFFSSSSSSEEEEEEEEETTTTTTTGGGGAAAAAGGGGKKKKKKKKKHHHHHHHHHHVVVVVVVPPPPPPPRRRRRRRRRRRAAAAAVVVVVVVYYYYYYYYYYYYVVVVVVVDDDDDDDDLLLLLLLLEEEEEEEEEPPPPPPPTTTTTTTVVVVVVVCCCCCCDDDDDDDDEEEEEEEEEVVVVVVVRRRRRRRRRRRTTTTTTTGGGGTTTTTTTYYYYYYYYYYYYRRRRRRRRRRRQQQQQQQQQLLLLLLLLYYYYYYYYYYYYHHHHHHHHHHPPPPPPPEEEEEEEEEQQQQQQQQQIIIIIIIIIIIIIIIISSSSSSGGGGKKKKKKKKKEEEEEEEEEDDDDDDDDAAAAAAAAAANNNNNNNNNNNNNNNNYYYYYYYYYYYYAAAAARRRRRRRRRRRGGGGHHHHHHHHHHYYYYYYYYYYYYTTTTTTTIIIIIIIIGGGGKKKKKKKKKEEEEEEEEEIIIIIIIIVVVVVVVDDDDDDDDLLLLLLLLVVVVVVVLLLLLLLLDDDDDDDDRRRRRRRRRRRIIIIIIIIRRRRRRRRRRRKKKKKKKKKLLLLLLLLAAAAADDDDDDDDNNNNNNNNCCCCCCTTTTTTTGGGGLLLLLLLLQQQQQQQQQGGGGFFFFFFFFFFFLLLLLLLLVVVVVVVFFFFFFFFFFFHHHHHHHHHHAAAAATTTTTTTGGGGGGGGGGGGTTTTTTTGGGGSSSSSSGGGGLLLLLLLLGGGGSSSSSSLLLLLLLLLLLLLLLLLLLLLLLLEEEEEEEEERRRRRRRRRRRLLLLLLLLSSSSSSVVVVVVVDDDDDDDDYYYYYYYYYYYYGGGGRRRRRRRRRRRKKKKKKKKKSSSSSSKKKKKKKKKLLLLLLLLSSSSSSFFFFFFFFFFFAAAAAIIIIIIIITTTTTTTPPPPPPPAAAAAPPPPPPPQQQQQQQQQVVVVVVVAAAAATTTTTTTAAAAAVVVVVVVVVVVVVVEEEEEEEEEPPPPPPPYYYYYYYYYYYYNNNNNNNNSSSSSSVVVVVVVLLLLLLLLSSSSSSTTTTTTTHHHHHHHHHHAAAAALLLLLLLLLLLLLLLLEEEEEEEEEHHHHHHHHHHTTTTTTTDDDDDDDDCCCCCCTTTTTTTFFFFFFFFFFFCCCCCCLLLLLLLLDDDDDDDDNNNNNNNNEEEEEEEEEAAAAALLLLLLLLYYYYYYYYYYYYDDDDDDDDVVVVVVVCCCCCCRRRRRRRRRRRRRRRRRRRRRRNNNNNNNNLLLLLLLLDDDDDDDDIIIIIIIIEEEEEEEEERRRRRRRRRRRPPPPPPPTTTTTTTYYYYYYYYYYYYTTTTTTTNNNNNNNNLLLLLLLLNNNNNNNNRRRRRRRRRRRLLLLLLLLVVVVVVVAAAAAQQQQQQQQQVVVVVVVIIIIIIIISSSSSSSSSSSSLLLLLLLLTTTTTTTAAAAASSSSSSLLLLLLLLRRRRRRRRRRRFFFFFFFFFFFDDDDDDDDGGGGAAAAALLLLLLLLNNNNNNNNVVVVVVVDDDDDDDDVVVVVVVTTTTTTTEEEEEEEEEFFFFFFFFFFFQQQQQQQQQTTTTTTTNNNNNNNNLLLLLLLLVVVVVVVPPPPPPPYYYYYYYYYYYYPPPPPPPRRRRRRRRRRRIIIIIIIIHHHHHHHHHHFFFFFFFFFFFMMMMMMMMLLLLLLLLTTTTTTTSSSSSSYYYYYYYYYYYYAAAAAPPPPPPPIIIIIIIIIIIIIIIISSSSSSAAAAAEEEEEEEEEKKKKKKKKKAAAAAYYYYYYYYYYYYHHHHHHHHHHEEEEEEEEEQQQQQQQQQLLLLLLLLSSSSSSVVVVVVVAAAAAEEEEEEEEEIIIIIIIITTTTTTTNNNNNNNNSSSSSSVVVVVVVFFFFFFFFFFFEEEEEEEEEPPPPPPPAAAAAGGGGMMMMMMMMMMMMMMMMTTTTTTTNNNNNNNNCCCCCCDDDDDDDDPPPPPPPRRRRRRRRRRRHHHHHHHHHHGGGGKKKKKKKKKYYYYYYYYYYYYMMMMMMMMAAAAACCCCCCCCCCCCLLLLLLLLMMMMMMMMYYYYYYYYYYYYRRRRRRRRRRRGGGGDDDDDDDDVVVVVVVVVVVVVVPPPPPPPKKKKKKKKKDDDDDDDDVVVVVVVNNNNNNNNAAAAAAAAAAVVVVVVVAAAAATTTTTTTIIIIIIIIKKKKKKKKKTTTTTTTKKKKKKKKKRRRRRRRRRRRTTTTTTTIIIIIIIIQQQQQQQQQFFFFFFFFFFFVVVVVVVDDDDDDDDWWWWWWWWWWWWWWCCCCCCPPPPPPPTTTTTTTGGGGFFFFFFFFFFFKKKKKKKKKCCCCCCGGGGIIIIIIIINNNNNNNNYYYYYYYYYYYYQQQQQQQQQPPPPPPPPPPPPPPTTTTTTTVVVVVVVVVVVVVVPPPPPPPGGGGGGGGDDDDDDDDLLLLLLLLAAAAARRRRRRRRRRRVVVVVVVQQQQQQQQQRRRRRRRRRRRAAAAAVVVVVVVCCCCCCMMMMMMMMVVVVVVVAAAAANNNNNNNNTTTTTTTTTTTTTTAAAAAIIIIIIIIAAAAAEEEEEEEEEAAAAALLLLLLLLSSSSSSRRRRRRRRRRRIIIIIIIIDDDDDDDDHHHHHHHHHHKKKKKKKKKFFFFFFFFFFFDDDDDDDDLLLLLLLLMMMMMMMMYYYYYYYYYYYYAAAAAKKKKKKKKKRRRRRRRRRRRAAAAAFFFFFFFFFFFVVVVVVVHHHHHHHHHHWWWWWWWWWWWWWWYYYYYYYYYYYYVVVVVVVGGGGEEEEEEEEEGGGGMMMMMMMMEEEEEEEEEEEEEEEEEEGGGGEEEEEEEEEFFFFFFFFFFFSSSSSSEEEEEEEEEAAAAARRRRRRRRRRREEEEEEEEEDDDDDDDDLLLLLLLLAAAAAAAAAALLLLLLLLEEEEEEEEEKKKKKKKKKDDDDDDDDYYYYYYYYYYYYEEEEEEEEEEEEEEEEEEVVVVVVVGGGGAAAAAEEEEEEEEETTTTTTTAAAAAEEEEEEEEEGGGGEEEEEEEEEGGGGEEEEEEEEEEEEEEEEEEEEEEEEEEEDDDDDDDDFFFFFFFFFFFGGGGEEEEEEEEEEEEEEEEEEYYYYYYYYYYYYY

SEQ ID NO: 40 - protein, 3551 aa, Schizosaccharomyces pombe
MMMMMMMMRRRRRRRRRRREEEEEEEEEIIIIIIIIIIIIIIIISSSSSSIIIIIIIIHHHHHHHHHHVVVVVVVGGGGQQQQQQQQQAAAAAGGGGTTTTTTTQQQQQQQQQIIIIIIIIGGGGNNNNNNNNAAAAACCCCCCWWWWWWWWWWWWWWEEEEEEEEELLLLLLLLYYYYYYYYYYYYCCCCCCLLLLLLLLEEEEEEEEEHHHHHHHHHHGGGGIIIIIIIIQQQQQQQQQPPPPPPPNNNNNNNNGGGGYYYYYYYYYYYYMMMMMMMMNNNNNNNNPPPPPPPEEEEEEEEETTTTTTTAAAAASSSSSSQQQQQQQQQNNNNNNNNSSSSSSDDDDDDDDGGGGGGGGFFFFFFFFFFFSSSSSSTTTTTTTFFFFFFFFFFFFFFFFFFFFFFSSSSSSEEEEEEEEETTTTTTTGGGGQQQQQQQQQGGGGKKKKKKKKKYYYYYYYYYYYYVVVVVVVPPPPPPPRRRRRRRRRRRSSSSSSIIIIIIIIYYYYYYYYYYYYVVVVVVVDDDDDDDDLLLLLLLLEEEEEEEEEPPPPPPPNNNNNNNNVVVVVVVIIIIIIIIDDDDDDDDQQQQQQQQQVVVVVVVRRRRRRRRRRRTTTTTTTGGGGPPPPPPPYYYYYYYYYYYYRRRRRRRRRRRDDDDDDDDLLLLLLLLFFFFFFFFFFFHHHHHHHHHHPPPPPPPEEEEEEEEEQQQQQQQQQLLLLLLLLIIIIIIIITTTTTTTGGGGKKKKKKKKKEEEEEEEEEDDDDDDDDAAAAASSSSSSNNNNNNNNNNNNNNNNYYYYYYYYYYYYAAAAARRRRRRRRRRRGGGGHHHHHHHHHHYYYYYYYYYYYYTTTTTTTVVVVVVVGGGGKKKKKKKKKEEEEEEEEELLLLLLLLVVVVVVVDDDDDDDDEEEEEEEEEVVVVVVVTTTTTTTDDDDDDDDKKKKKKKKKIIIIIIIIRRRRRRRRRRRRRRRRRRRRRRIIIIIIIIAAAAADDDDDDDDNNNNNNNNCCCCCCSSSSSSGGGGLLLLLLLLQQQQQQQQQGGGGFFFFFFFFFFFLLLLLLLLVVVVVVVFFFFFFFFFFFHHHHHHHHHHSSSSSSFFFFFFFFFFFGGGGGGGGGGGGTTTTTTTGGGGSSSSSSGGGGFFFFFFFFFFFGGGGAAAAALLLLLLLLLLLLLLLLLLLLLLLLEEEEEEEEERRRRRRRRRRRLLLLLLLLAAAAAMMMMMMMMEEEEEEEEEYYYYYYYYYYYYTTTTTTTKKKKKKKKKKKKKKKKKKSSSSSSKKKKKKKKKLLLLLLLLQQQQQQQQQFFFFFFFFFFFSSSSSSVVVVVVVYYYYYYYYYYYYPPPPPPPAAAAAPPPPPPPQQQQQQQQQVVVVVVVSSSSSSTTTTTTTSSSSSSVVVVVVVVVVVVVVEEEEEEEEEPPPPPPPYYYYYYYYYYYYNNNNNNNNSSSSSSVVVVVVVLLLLLLLLTTTTTTTTTTTTTTHHHHHHHHHHAAAAATTTTTTTLLLLLLLLDDDDDDDDLLLLLLLLAAAAADDDDDDDDCCCCCCTTTTTTTFFFFFFFFFFFMMMMMMMMVVVVVVVDDDDDDDDNNNNNNNNEEEEEEEEESSSSSSCCCCCCYYYYYYYYYYYYDDDDDDDDIIIIIIIICCCCCCRRRRRRRRRRRRRRRRRRRRRRNNNNNNNNLLLLLLLLDDDDDDDDIIIIIIIIEEEEEEEEERRRRRRRRRRRPPPPPPPSSSSSSYYYYYYYYYYYYEEEEEEEEENNNNNNNNLLLLLLLLNNNNNNNNRRRRRRRRRRRLLLLLLLLIIIIIIIIAAAAAQQQQQQQQQVVVVVVVVVVVVVVSSSSSSSSSSSSIIIIIIIITTTTTTTAAAAASSSSSSLLLLLLLLRRRRRRRRRRRFFFFFFFFFFFEEEEEEEEEGGGGSSSSSSLLLLLLLLNNNNNNNNVVVVVVVDDDDDDDDLLLLLLLLAAAAAEEEEEEEEEFFFFFFFFFFFQQQQQQQQQTTTTTTTNNNNNNNNLLLLLLLLVVVVVVVPPPPPPPYYYYYYYYYYYYPPPPPPPRRRRRRRRRRRIIIIIIIIHHHHHHHHHHFFFFFFFFFFFPPPPPPPLLLLLLLLVVVVVVVTTTTTTTYYYYYYYYYYYYAAAAAPPPPPPPIIIIIIIIVVVVVVVSSSSSSAAAAAAAAAAKKKKKKKKKAAAAAFFFFFFFFFFFHHHHHHHHHHEEEEEEEEESSSSSSNNNNNNNNSSSSSSVVVVVVVQQQQQQQQQEEEEEEEEEIIIIIIIITTTTTTTNNNNNNNNQQQQQQQQQCCCCCCFFFFFFFFFFFEEEEEEEEEPPPPPPPYYYYYYYYYYYYNNNNNNNNQQQQQQQQQMMMMMMMMVVVVVVVKKKKKKKKKCCCCCCDDDDDDDDPPPPPPPRRRRRRRRRRRAAAAAGGGGRRRRRRRRRRRYYYYYYYYYYYYMMMMMMMMAAAAATTTTTTTCCCCCCLLLLLLLLLLLLLLLLYYYYYYYYYYYYRRRRRRRRRRRGGGGDDDDDDDDVVVVVVVIIIIIIIIPPPPPPPRRRRRRRRRRRDDDDDDDDVVVVVVVQQQQQQQQQAAAAAAAAAAVVVVVVVTTTTTTTTTTTTTTIIIIIIIIKKKKKKKKKAAAAAKKKKKKKKKRRRRRRRRRRRTTTTTTTIIIIIIIIQQQQQQQQQFFFFFFFFFFFVVVVVVVDDDDDDDDWWWWWWWWWWWWWWCCCCCCPPPPPPPTTTTTTTGGGGFFFFFFFFFFFKKKKKKKKKIIIIIIIIGGGGIIIIIIIICCCCCCDDDDDDDDRRRRRRRRRRRPPPPPPPPPPPPPPQQQQQQQQQHHHHHHHHHHIIIIIIIIEEEEEEEEEGGGGSSSSSSEEEEEEEEEIIIIIIIIAAAAAKKKKKKKKKVVVVVVVDDDDDDDDRRRRRRRRRRRAAAAAVVVVVVVCCCCCCMMMMMMMMLLLLLLLLSSSSSSNNNNNNNNTTTTTTTTTTTTTTSSSSSSIIIIIIIIAAAAAEEEEEEEEEAAAAAWWWWWWWWWWWWWWSSSSSSRRRRRRRRRRRLLLLLLLLDDDDDDDDHHHHHHHHHHKKKKKKKKKFFFFFFFFFFFDDDDDDDDLLLLLLLLMMMMMMMMYYYYYYYYYYYYSSSSSSKKKKKKKKKRRRRRRRRRRRAAAAAFFFFFFFFFFFVVVVVVVHHHHHHHHHHWWWWWWWWWWWWWWYYYYYYYYYYYYVVVVVVVGGGGEEEEEEEEEGGGGMMMMMMMMEEEEEEEEEEEEEEEEEEGGGGEEEEEEEEEFFFFFFFFFFFSSSSSSEEEEEEEEEAAAAARRRRRRRRRRREEEEEEEEEDDDDDDDDLLLLLLLLAAAAAAAAAALLLLLLLLEEEEEEEEERRRRRRRRRRRDDDDDDDDYYYYYYYYYYYYEEEEEEEEEEEEEEEEEEVVVVVVVGGGGQQQQQQQQQDDDDDDDDSSSSSSMMMMMMMMEEEEEEEEEVVVVVVVDDDDDDDDYYYYYYYYYYYYMMMMMMMMEEEEEEEEEEEEEEEEEEEEEEEEEEEYYYYYYYYYYYYY

SEQ ID NO: 41 - protein, 3462 aa, Stylonychia lemnae
MMMMMMMMRRRRRRRRRRREEEEEEEEEVVVVVVVIIIIIIIISSSSSSIIIIIIIIHHHHHHHHHHVVVVVVVGGGGQQQQQQQQQAAAAAGGGGIIIIIIIIQQQQQQQQQVVVVVVVGGGGNNNNNNNNAAAAACCCCCCWWWWWWWWWWWWWWEEEEEEEEELLLLLLLLFFFFFFFFFFFCCCCCCLLLLLLLLEEEEEEEEEHHHHHHHHHHGGGGIIIIIIIIQQQQQQQQQPPPPPPPDDDDDDDDGGGGQQQQQQQQQMMMMMMMMPPPPPPPSSSSSSNNNNNNNNKKKKKKKKKTTTTTTTIIIIIIIIGGGGGGGGGGGGDDDDDDDDDDDDDDDDAAAAAFFFFFFFFFFFNNNNNNNNTTTTTTTFFFFFFFFFFFFFFFFFFFFFFSSSSSSEEEEEEEEETTTTTTTGGGGTTTTTTTGGGGKKKKKKKKKHHHHHHHHHHVVVVVVVPPPPPPPRRRRRRRRRRRCCCCCCVVVVVVVFFFFFFFFFFFLLLLLLLLDDDDDDDDLLLLLLLLGGGGPPPPPPPTTTTTTTVVVVVVVIIIIIIIIDDDDDDDDEEEEEEEEEVVVVVVVRRRRRRRRRRRTTTTTTTGGGGTTTTTTTYYYYYYYYYYYYRRRRRRRRRRRQQQQQQQQQLLLLLLLLFFFFFFFFFFFHHHHHHHHHHPPPPPPPEEEEEEEEEQQQQQQQQQLLLLLLLLIIIIIIIISSSSSSGGGGKKKKKKKKKEEEEEEEEEDDDDDDDDAAAAAAAAAANNNNNNNNNNNNNNNNFFFFFFFFFFFAAAAARRRRRRRRRRRGGGGHHHHHHHHHHYYYYYYYYYYYYTTTTTTTIIIIIIIIGGGGKKKKKKKKKEEEEEEEEEIIIIIIIIVVVVVVVDDDDDDDDLLLLLLLLCCCCCCLLLLLLLLDDDDDDDDGGGGIIIIIIIIRRRRRRRRRRRKKKKKKKKKLLLLLLLLAAAAADDDDDDDDQQQQQQQQQCCCCCCTTTTTTTGGGGLLLLLLLLQQQQQQQQQGGGGFFFFFFFFFFFLLLLLLLLVVVVVVVFFFFFFFFFFFNNNNNNNNSSSSSSVVVVVVVGGGGGGGGGGGGTTTTTTTGGGGSSSSSSGGGGLLLLLLLLGGGGSSSSSSLLLLLLLLLLLLLLLLLLLLLLLLEEEEEEEEERRRRRRRRRRRLLLLLLLLSSSSSSVVVVVVVDDDDDDDDYYYYYYYYYYYYGGGGKKKKKKKKKKKKKKKKKKSSSSSSKKKKKKKKKLLLLLLLLGGGGFFFFFFFFFFFTTTTTTTIIIIIIIIYYYYYYYYYYYYPPPPPPPSSSSSSPPPPPPPQQQQQQQQQVVVVVVVSSSSSSTTTTTTTAAAAAVVVVVVVVVVVVVVEEEEEEEEEPPPPPPPYYYYYYYYYYYYNNNNNNNNSSSSSSVVVVVVVLLLLLLLLSSSSSSTTTTTTTHHHHHHHHHHSSSSSSLLLLLLLLLLLLLLLLEEEEEEEEEHHHHHHHHHHTTTTTTTDDDDDDDDVVVVVVVAAAAAVVVVVVVMMMMMMMMLLLLLLLLDDDDDDDDNNNNNNNNEEEEEEEEEAAAAAVVVVVVVYYYYYYYYYYYYDDDDDDDDIIIIIIIICCCCCCRRRRRRRRRRRRRRRRRRRRRRNNNNNNNNLLLLLLLLDDDDDDDDIIIIIIIIEEEEEEEEERRRRRRRRRRRPPPPPPPTTTTTTTYYYYYYYYYYYYTTTTTTTNNNNNNNNLLLLLLLLNNNNNNNNRRRRRRRRRRRLLLLLLLLIIIIIIIIAAAAAQQQQQQQQQVVVVVVVIIIIIIIISSSSSSSSSSSSLLLLLLLLTTTTTTTAAAAASSSSSSLLLLLLLLRRRRRRRRRRRFFFFFFFFFFFDDDDDDDDGGGGAAAAALLLLLLLLNNNNNNNNVVVVVVVDDDDDDDDVVVVVVVTTTTTTTEEEEEEEEEFFFFFFFFFFFQQQQQQQQQTTTTTTTNNNNNNNNLLLLLLLLVVVVVVVPPPPPPPYYYYYYYYYYYYPPPPPPPRRRRRRRRRRRIIIIIIIIHHHHHHHHHHFFFFFFFFFFFMMMMMMMMLLLLLLLLSSSSSSSSSSSSAAAAAPPPPPPPVVVVVVVIIIIIIIISSSSSSAAAAAEEEEEEEEEKKKKKKKKKAAAAAYYYYYYYYYYYYHHHHHHHHHHEEEEEEEEEQQQQQQQQQLLLLLLLLSSSSSSVVVVVVVAAAAAEEEEEEEEEIIIIIIIITTTTTTTNNNNNNNNSSSSSSAAAAAFFFFFFFFFFFEEEEEEEEEPPPPPPPAAAAASSSSSSMMMMMMMMMMMMMMMMAAAAAKKKKKKKKKCCCCCCDDDDDDDDPPPPPPPRRRRRRRRRRRHHHHHHHHHHGGGGKKKKKKKKKYYYYYYYYYYYYMMMMMMMMAAAAACCCCCCCCCCCCLLLLLLLLMMMMMMMMYYYYYYYYYYYYRRRRRRRRRRRGGGGDDDDDDDDVVVVVVVVVVVVVVPPPPPPPKKKKKKKKKDDDDDDDDVVVVVVVNNNNNNNNAAAAAAAAAAVVVVVVVAAAAATTTTTTTIIIIIIIIKKKKKKKKKTTTTTTTKKKKKKKKKRRRRRRRRRRRTTTTTTTIIIIIIIIQQQQQQQQQFFFFFFFFFFFVVVVVVVDDDDDDDDWWWWWWWWWWWWWWCCCCCCPPPPPPPTTTTTTTGGGGFFFFFFFFFFFKKKKKKKKKCCCCCCGGGGIIIIIIIINNNNNNNNYYYYYYYYYYYYQQQQQQQQQPPPPPPPPPPPPPPTTTTTTTVVVVVVVVVVVVVVPPPPPPPSSSSSSGGGGDDDDDDDDLLLLLLLLAAAAAKKKKKKKKKVVVVVVVMMMMMMMMRRRRRRRRRRRAAAAAVVVVVVVCCCCCCMMMMMMMMIIIIIIIISSSSSSNNNNNNNNSSSSSSTTTTTTTAAAAAIIIIIIIIAAAAAEEEEEEEEEVVVVVVVFFFFFFFFFFFSSSSSSRRRRRRRRRRRIIIIIIIIDDDDDDDDHHHHHHHHHHKKKKKKKKKFFFFFFFFFFFDDDDDDDDLLLLLLLLMMMMMMMMYYYYYYYYYYYYAAAAAKKKKKKKKKRRRRRRRRRRRAAAAAFFFFFFFFFFFVVVVVVVHHHHHHHHHHWWWWWWWWWWWWWWYYYYYYYYYYYYVVVVVVVGGGGEEEEEEEEEGGGGMMMMMMMMEEEEEEEEEEEEEEEEEEGGGGEEEEEEEEEFFFFFFFFFFFSSSSSSEEEEEEEEEAAAAARRRRRRRRRRREEEEEEEEEDDDDDDDDLLLLLLLLAAAAAAAAAALLLLLLLLEEEEEEEEEKKKKKKKKKDDDDDDDDYYYYYYYYYYYYEEEEEEEEEEEEEEEEEEVVVVVVVGGGGIIIIIIIIEEEEEEEEETTTTTTTAAAAAEEEEEEEEEGGGGEEEEEEEEEGGGGEEEEEEEEEEEEEEEEEEEEEEEEEEEGGGGMMMMMMMMEEEEEEEEEE

SEQ ID NO: 42 - protein, 3488 aa, Arabidopsis thaliana
MMMMMMMMRRRRRRRRRRREEEEEEEEEIIIIIIIIIIIIIIIISSSSSSIIIIIIIIHHHHHHHHHHIIIIIIIIGGGGQQQQQQQQQAAAAAGGGGIIIIIIIIQQQQQQQQQVVVVVVVGGGGNNNNNNNNSSSSSSCCCCCCWWWWWWWWWWWWWWEEEEEEEEELLLLLLLLYYYYYYYYYYYYCCCCCCLLLLLLLLEEEEEEEEEHHHHHHHHHHGGGGIIIIIIIIQQQQQQQQQPPPPPPPDDDDDDDDGGGGMMMMMMMMMMMMMMMMPPPPPPPSSSSSSDDDDDDDDTTTTTTTTTTTTTTVVVVVVVGGGGVVVVVVVAAAAAHHHHHHHHHHDDDDDDDDAAAAAFFFFFFFFFFFNNNNNNNNTTTTTTTFFFFFFFFFFFFFFFFFFFFFFSSSSSSEEEEEEEEETTTTTTTGGGGAAAAAGGGGKKKKKKKKKHHHHHHHHHHVVVVVVVPPPPPPPRRRRRRRRRRRAAAAAVVVVVVVFFFFFFFFFFFVVVVVVVDDDDDDDDLLLLLLLLEEEEEEEEEPPPPPPPTTTTTTTVVVVVVVIIIIIIIIDDDDDDDDEEEEEEEEEVVVVVVVRRRRRRRRRRRTTTTTTTGGGGTTTTTTTYYYYYYYYYYYYRRRRRRRRRRRQQQQQQQQQLLLLLLLLFFFFFFFFFFFHHHHHHHHHHPPPPPPPEEEEEEEEEQQQQQQQQQLLLLLLLLIIIIIIIISSSSSSGGGGKKKKKKKKKEEEEEEEEEDDDDDDDDAAAAAAAAAANNNNNNNNNNNNNNNNFFFFFFFFFFFAAAAARRRRRRRRRRRGGGGHHHHHHHHHHYYYYYYYYYYYYTTTTTTTVVVVVVVGGGGKKKKKKKKKEEEEEEEEEIIIIIIIIVVVVVVVDDDDDDDDLLLLLLLLCCCCCCLLLLLLLLDDDDDDDDRRRRRRRRRRRVVVVVVVRRRRRRRRRRRKKKKKKKKKLLLLLLLLAAAAADDDDDDDDNNNNNNNNCCCCCCTTTTTTTGGGGLLLLLLLLQQQQQQQQQGGGGFFFFFFFFFFFLLLLLLLLVVVVVVVFFFFFFFFFFFNNNNNNNNAAAAAVVVVVVVGGGGGGGGGGGGTTTTTTTGGGGSSSSSSGGGGLLLLLLLLGGGGSSSSSSLLLLLLLLLLLLLLLLLLLLLLLLEEEEEEEEERRRRRRRRRRRLLLLLLLLSSSSSSVVVVVVVDDDDDDDDYYYYYYYYYYYYGGGGKKKKKKKKKKKKKKKKKKSSSSSSKKKKKKKKKLLLLLLLLGGGGFFFFFFFFFFFTTTTTTTIIIIIIIIYYYYYYYYYYYYPPPPPPPSSSSSSPPPPPPPQQQQQQQQQVVVVVVVSSSSSSTTTTTTTAAAAAVVVVVVVVVVVVVVEEEEEEEEEPPPPPPPYYYYYYYYYYYYNNNNNNNNSSSSSSVVVVVVVLLLLLLLLSSSSSSTTTTTTTHHHHHHHHHHSSSSSSLLLLLLLLLLLLLLLLEEEEEEEEEHHHHHHHHHHTTTTTTTDDDDDDDDVVVVVVVAAAAAVVVVVVVLLLLLLLLLLLLLLLLDDDDDDDDNNNNNNNNEEEEEEEEEAAAAAIIIIIIIIYYYYYYYYYYYYDDDDDDDDIIIIIIIICCCCCCRRRRRRRRRRRRRRRRRRRRRRSSSSSSLLLLLLLLDDDDDDDDIIIIIIIIEEEEEEEEERRRRRRRRRRRPPPPPPPTTTTTTTYYYYYYYYYYYYTTTTTTTNNNNNNNNLLLLLLLLNNNNNNNNRRRRRRRRRRRLLLLLLLLIIIIIIIISSSSSSQQQQQQQQQIIIIIIIIIIIIIIIISSSSSSSSSSSSLLLLLLLLTTTTTTTTTTTTTTSSSSSSLLLLLLLLRRRRRRRRRRRFFFFFFFFFFFDDDDDDDDGGGGAAAAAIIIIIIIINNNNNNNNVVVVVVVDDDDDDDDIIIIIIIITTTTTTTEEEEEEEEEFFFFFFFFFFFQQQQQQQQQTTTTTTTNNNNNNNNLLLLLLLLVVVVVVVPPPPPPPYYYYYYYYYYYYPPPPPPPRRRRRRRRRRRIIIIIIIIHHHHHHHHHHFFFFFFFFFFFMMMMMMMMLLLLLLLLSSSSSSSSSSSSYYYYYYYYYYYYAAAAAPPPPPPPVVVVVVVIIIIIIIISSSSSSAAAAAAAAAAKKKKKKKKKAAAAAYYYYYYYYYYYYHHHHHHHHHHEEEEEEEEEQQQQQQQQQLLLLLLLLSSSSSSVVVVVVVPPPPPPPEEEEEEEEEIIIIIIIITTTTTTTNNNNNNNNAAAAAVVVVVVVFFFFFFFFFFFEEEEEEEEEPPPPPPPAAAAASSSSSSMMMMMMMMMMMMMMMMAAAAAKKKKKKKKKCCCCCCDDDDDDDDPPPPPPPRRRRRRRRRRRHHHHHHHHHHGGGGKKKKKKKKKYYYYYYYYYYYYMMMMMMMMAAAAACCCCCCCCCCCCLLLLLLLLMMMMMMMMYYYYYYYYYYYYRRRRRRRRRRRGGGGDDDDDDDDVVVVVVVVVVVVVVPPPPPPPKKKKKKKKKDDDDDDDDVVVVVVVNNNNNNNNAAAAAAAAAAVVVVVVVGGGGTTTTTTTIIIIIIIIKKKKKKKKKTTTTTTTKKKKKKKKKRRRRRRRRRRRTTTTTTTVVVVVVVQQQQQQQQQFFFFFFFFFFFVVVVVVVDDDDDDDDWWWWWWWWWWWWWWCCCCCCPPPPPPPTTTTTTTGGGGFFFFFFFFFFFKKKKKKKKKCCCCCCGGGGIIIIIIIINNNNNNNNYYYYYYYYYYYYQQQQQQQQQPPPPPPPPPPPPPPTTTTTTTVVVVVVVVVVVVVVPPPPPPPGGGGGGGGDDDDDDDDLLLLLLLLAAAAAKKKKKKKKKVVVVVVVQQQQQQQQQRRRRRRRRRRRAAAAAVVVVVVVCCCCCCMMMMMMMMIIIIIIIISSSSSSNNNNNNNNNNNNNNNNTTTTTTTAAAAAVVVVVVVAAAAAEEEEEEEEEVVVVVVVFFFFFFFFFFFSSSSSSRRRRRRRRRRRIIIIIIIIDDDDDDDDHHHHHHHHHHKKKKKKKKKFFFFFFFFFFFDDDDDDDDLLLLLLLLMMMMMMMMYYYYYYYYYYYYAAAAAKKKKKKKKKRRRRRRRRRRRAAAAAFFFFFFFFFFFVVVVVVVHHHHHHHHHHWWWWWWWWWWWWWWYYYYYYYYYYYYVVVVVVVGGGGEEEEEEEEEGGGGMMMMMMMMEEEEEEEEEEEEEEEEEEGGGGEEEEEEEEEFFFFFFFFFFFSSSSSSEEEEEEEEEAAAAARRRRRRRRRRREEEEEEEEEDDDDDDDDLLLLLLLLAAAAAAAAAALLLLLLLLEEEEEEEEEKKKKKKKKKDDDDDDDDYYYYYYYYYYYYEEEEEEEEEEEEEEEEEEVVVVVVVGGGGAAAAAEEEEEEEEEGGGGGGGGDDDDDDDDDDDDDDDDEEEEEEEEEEEEEEEEEEDDDDDDDDEEEEEEEEEGGGGEEEEEEEEEDDDDDDDDYYYYYYYYYYYYY

SEQ ID NO: 43 - protein, 2537 aa, Gallus gallus
AAAAADDDDDDDDQQQQQQQQQCCCCCCSSSSSSGGGGLLLLLLLLQQQQQQQQQGGGGFFFFFFFFFFFLLLLLLLLVVVVVVVFFFFFFFFFFFHHHHHHHHHHSSSSSSFFFFFFFFFFFGGGGGGGGGGGGTTTTTTTGGGGSSSSSSGGGGFFFFFFFFFFFTTTTTTTSSSSSSLLLLLLLLLLLLLLLLMMMMMMMMEEEEEEEEERRRRRRRRRRRLLLLLLLLSSSSSSVVVVVVVEEEEEEEEEYYYYYYYYYYYYSSSSSSKKKKKKKKKKKKKKKKKKSSSSSSKKKKKKKKKLLLLLLLLEEEEEEEEEFFFFFFFFFFFSSSSSSVVVVVVVYYYYYYYYYYYYPPPPPPPDDDDDDDDRRRRRRRRRRRQQQQQQQQQVVVVVVVSSSSSSTTTTTTTAAAAAVVVVVVVVVVVVVVEEEEEEEEEPPPPPPPYYYYYYYYYYYYNNNNNNNNSSSSSSIIIIIIIILLLLLLLLTTTTTTTTTTTTTTHHHHHHHHHHTTTTTTTTTTTTTTLLLLLLLLEEEEEEEEEHHHHHHHHHHSSSSSSDDDDDDDDCCCCCCSSSSSSFFFFFFFFFFFMMMMMMMMVVVVVVVDDDDDDDDNNNNNNNNEEEEEEEEEAAAAAIIIIIIIIYYYYYYYYYYYYDDDDDDDDIIIIIIIICCCCCCNNNNNNNNRRRRRRRRRRRNNNNNNNNLLLLLLLLDDDDDDDDIIIIIIIIEEEEEEEEERRRRRRRRRRRPPPPPPPTTTTTTTYYYYYYYYYYYYTTTTTTTNNNNNNNNLLLLLLLLNNNNNNNNRRRRRRRRRRRLLLLLLLLIIIIIIIIGGGGQQQQQQQQQIIIIIIIIVVVVVVVSSSSSSSSSSSSVVVVVVVTTTTTTTAAAAASSSSSSLLLLLLLLRRRRRRRRRRRFFFFFFFFFFFNNNNNNNNGGGGAAAAALLLLLLLLNNNNNNNNVVVVVVVDDDDDDDDLLLLLLLLIIIIIIIIEEEEEEEEEFFFFFFFFFFFQQQQQQQQQTTTTTTTNNNNNNNNLLLLLLLLVVVVVVVPPPPPPPYYYYYYYYYYYYPPPPPPPRRRRRRRRRRRIIIIIIIIHHHHHHHHHHFFFFFFFFFFFPPPPPPPLLLLLLLLTTTTTTTTTTTTTTYYYYYYYYYYYYAAAAARRRRRRRRRRRIIIIIIIIIIIIIIIISSSSSSAAAAAEEEEEEEEEKKKKKKKKKAAAAAYYYYYYYYYYYYHHHHHHHHHHEEEEEEEEEQQQQQQQQQLLLLLLLLSSSSSSVVVVVVVPPPPPPPEEEEEEEEEIIIIIIIITTTTTTTNNNNNNNNAAAAACCCCCCFFFFFFFFFFFEEEEEEEEEFFFFFFFFFFFSSSSSSNNNNNNNNQQQQQQQQQMMMMMMMMVVVVVVVKKKKKKKKKCCCCCCDDDDDDDDPPPPPPPRRRRRRRRRRRRRRRRRRRRRRGGGGKKKKKKKKKYYYYYYYYYYYYMMMMMMMMAAAAACCCCCCCCCCCCLLLLLLLLLLLLLLLLYYYYYYYYYYYYRRRRRRRRRRRGGGGDDDDDDDDVVVVVVVVVVVVVVPPPPPPPKKKKKKKKKDDDDDDDDVVVVVVVNNNNNNNNAAAAAAAAAAIIIIIIIIAAAAAAAAAAIIIIIIIIKKKKKKKKKTTTTTTTRRRRRRRRRRRRRRRRRRRRRRSSSSSSIIIIIIIIQQQQQQQQQFFFFFFFFFFFVVVVVVVDDDDDDDDWWWWWWWWWWWWWWCCCCCCPPPPPPPTTTTTTTGGGGFFFFFFFFFFFKKKKKKKKKVVVVVVVGGGGIIIIIIIINNNNNNNNYYYYYYYYYYYYQQQQQQQQQPPPPPPPPPPPPPPTTTTTTTVVVVVVVVVVVVVVPPPPPPPGGGGGGGGDDDDDDDDLLLLLLLLAAAAAKKKKKKKKKVVVVVVVQQQQQQQQQRRRRRRRRRRRAAAAAVVVVVVVCCCCCCMMMMMMMMLLLLLLLLSSSSSSNNNNNNNNTTTTTTTTTTTTTTAAAAAIIIIIIIIAAAAAEEEEEEEEEAAAAAWWWWWWWWWWWWWWAAAAARRRRRRRRRRRLLLLLLLLDDDDDDDDHHHHHHHHHHKKKKKKKKKFFFFFFFFFFFDDDDDDDDLLLLLLLLMMMMMMMMYYYYYYYYYYYYAAAAAKKKKKKKKKRRRRRRRRRRRAAAAAFFFFFFFFFFFVVVVVVVHHHHHHHHHHWWWWWWWWWWWWWWYYYYYYYYYYYYVVVVVVVGGGGEEEEEEEEEGGGGMMMMMMMMEEEEEEEEEEEEEEEEEEGGGGEEEEEEEEEFFFFFFFFFFFSSSSSSEEEEEEEEEAAAAARRRRRRRRRRREEEEEEEEEDDDDDDDDLLLLLLLLAAAAAAAAAALLLLLLLLEEEEEEEEEKKKKKKKKKDDDDDDDDYYYYYYYYYYYYEEEEEEEEEEEEEEEEEEVVVVVVVGGGGRRRRRRRRRRRNNNNNNNNSSSSSSAAAAADDDDDDDDGGGGGGGGEEEEEEEEEFFFFFFFFFFFEEEEEEEEEEEEEEEEEEE

SEQ ID NO: 44 - protein, 3507 aa, Drosophila melanogaster
MMMMMMMMRRRRRRRRRRREEEEEEEEECCCCCCIIIIIIIISSSSSSIIIIIIIIHHHHHHHHHHVVVVVVVGGGGQQQQQQQQQAAAAAGGGGVVVVVVVQQQQQQQQQIIIIIIIIGGGGNNNNNNNNAAAAACCCCCCWWWWWWWWWWWWWWEEEEEEEEELLLLLLLLYYYYYYYYYYYYCCCCCCLLLLLLLLEEEEEEEEEHHHHHHHHHHGGGGIIIIIIIIQQQQQQQQQPPPPPPPDDDDDDDDGGGGQQQQQQQQQMMMMMMMMPPPPPPPSSSSSSDDDDDDDDKKKKKKKKKTTTTTTTVVVVVVVGGGGGGGGGGGGDDDDDDDDDDDDDDDDSSSSSSFFFFFFFFFFFNNNNNNNNTTTTTTTFFFFFFFFFFFFFFFFFFFFFFSSSSSSEEEEEEEEETTTTTTTGGGGAAAAAGGGGKKKKKKKKKHHHHHHHHHHVVVVVVVPPPPPPPRRRRRRRRRRRAAAAAVVVVVVVFFFFFFFFFFFVVVVVVVDDDDDDDDLLLLLLLLEEEEEEEEEPPPPPPPTTTTTTTVVVVVVVVVVVVVVDDDDDDDDEEEEEEEEEVVVVVVVRRRRRRRRRRRTTTTTTTGGGGTTTTTTTYYYYYYYYYYYYRRRRRRRRRRRQQQQQQQQQLLLLLLLLFFFFFFFFFFFHHHHHHHHHHPPPPPPPEEEEEEEEEQQQQQQQQQLLLLLLLLIIIIIIIITTTTTTTGGGGKKKKKKKKKEEEEEEEEEDDDDDDDDAAAAAAAAAANNNNNNNNNNNNNNNNYYYYYYYYYYYYAAAAARRRRRRRRRRRGGGGHHHHHHHHHHYYYYYYYYYYYYTTTTTTTIIIIIIIIGGGGKKKKKKKKKEEEEEEEEEIIIIIIIIVVVVVVVDDDDDDDDLLLLLLLLVVVVVVVLLLLLLLLDDDDDDDDRRRRRRRRRRRIIIIIIIIRRRRRRRRRRRKKKKKKKKKLLLLLLLLAAAAADDDDDDDDQQQQQQQQQCCCCCCTTTTTTTGGGGLLLLLLLLQQQQQQQQQGGGGFFFFFFFFFFFLLLLLLLLIIIIIIIIFFFFFFFFFFFHHHHHHHHHHSSSSSSFFFFFFFFFFFGGGGGGGGGGGGTTTTTTTGGGGSSSSSSGGGGFFFFFFFFFFFTTTTTTTSSSSSSLLLLLLLLLLLLLLLLMMMMMMMMEEEEEEEEERRRRRRRRRRRLLLLLLLLSSSSSSVVVVVVVDDDDDDDDYYYYYYYYYYYYGGGGKKKKKKKKKKKKKKKKKKSSSSSSKKKKKKKKKLLLLLLLLEEEEEEEEEFFFFFFFFFFFAAAAAVVVVVVVYYYYYYYYYYYYPPPPPPPAAAAAPPPPPPPQQQQQQQQQVVVVVVVSSSSSSTTTTTTTAAAAAVVVVVVVVVVVVVVEEEEEEEEEPPPPPPPYYYYYYYYYYYYNNNNNNNNSSSSSSIIIIIIIILLLLLLLLTTTTTTTTTTTTTTHHHHHHHHHHTTTTTTTTTTTTTTLLLLLLLLEEEEEEEEEHHHHHHHHHHSSSSSSDDDDDDDDCCCCCCAAAAAFFFFFFFFFFFMMMMMMMMVVVVVVVDDDDDDDDNNNNNNNNEEEEEEEEEAAAAAIIIIIIIIYYYYYYYYYYYYDDDDDDDDIIIIIIIICCCCCCRRRRRRRRRRRRRRRRRRRRRRNNNNNNNNLLLLLLLLDDDDDDDDIIIIIIIIEEEEEEEEERRRRRRRRRRRPPPPPPPTTTTTTTYYYYYYYYYYYYTTTTTTTNNNNNNNNLLLLLLLLNNNNNNNNRRRRRRRRRRRLLLLLLLLIIIIIIIIGGGGQQQQQQQQQIIIIIIIIVVVVVVVSSSSSSSSSSSSIIIIIIIITTTTTTTAAAAASSSSSSLLLLLLLLRRRRRRRRRRRFFFFFFFFFFFDDDDDDDDGGGGAAAAALLLLLLLLNNNNNNNNVVVVVVVDDDDDDDDLLLLLLLLTTTTTTTEEEEEEEEEFFFFFFFFFFFQQQQQQQQQTTTTTTTNNNNNNNNLLLLLLLLVVVVVVVPPPPPPPYYYYYYYYYYYYPPPPPPPRRRRRRRRRRRIIIIIIIIHHHHHHHHHHFFFFFFFFFFFPPPPPPPLLLLLLLLVVVVVVVTTTTTTTYYYYYYYYYYYYAAAAAPPPPPPPVVVVVVVIIIIIIIISSSSSSAAAAAEEEEEEEEEKKKKKKKKKAAAAAYYYYYYYYYYYYHHHHHHHHHHEEEEEEEEEQQQQQQQQQLLLLLLLLSSSSSSVVVVVVVAAAAAEEEEEEEEEIIIIIIIITTTTTTTNNNNNNNNAAAAACCCCCCFFFFFFFFFFFEEEEEEEEEPPPPPPPAAAAANNNNNNNNQQQQQQQQQMMMMMMMMVVVVVVVKKKKKKKKKVVVVVVVDDDDDDDDPPPPPPPRRRRRRRRRRRHHHHHHHHHHGGGGKKKKKKKKKYYYYYYYYYYYYMMMMMMMMAAAAACCCCCCCCCCCCMMMMMMMMLLLLLLLLYYYYYYYYYYYYRRRRRRRRRRRGGGGDDDDDDDDVVVVVVVVVVVVVVPPPPPPPKKKKKKKKKDDDDDDDDVVVVVVVNNNNNNNNAAAAAAAAAAIIIIIIIIAAAAATTTTTTTIIIIIIIIKKKKKKKKKTTTTTTTKKKKKKKKKRRRRRRRRRRRTTTTTTTIIIIIIIIQQQQQQQQQFFFFFFFFFFFVVVVVVVDDDDDDDDWWWWWWWWWWWWWWCCCCCCPPPPPPPTTTTTTTGGGGFFFFFFFFFFFKKKKKKKKKVVVVVVVGGGGIIIIIIIINNNNNNNNYYYYYYYYYYYYQQQQQQQQQPPPPPPPPPPPPPPTTTTTTTVVVVVVVVVVVVVVPPPPPPPGGGGGGGGDDDDDDDDLLLLLLLLAAAAAKKKKKKKKKVVVVVVVQQQQQQQQQRRRRRRRRRRRAAAAAVVVVVVVCCCCCCMMMMMMMMLLLLLLLLSSSSSSNNNNNNNNTTTTTTTTTTTTTTAAAAAIIIIIIIIAAAAAEEEEEEEEEAAAAAWWWWWWWWWWWWWWAAAAARRRRRRRRRRRLLLLLLLLDDDDDDDDHHHHHHHHHHKKKKKKKKKFFFFFFFFFFFDDDDDDDDLLLLLLLLMMMMMMMMYYYYYYYYYYYYAAAAAKKKKKKKKKRRRRRRRRRRRAAAAAFFFFFFFFFFFVVVVVVVHHHHHHHHHHWWWWWWWWWWWWWWYYYYYYYYYYYYVVVVVVVGGGGEEEEEEEEEGGGGMMMMMMMMEEEEEEEEEEEEEEEEEEGGGGEEEEEEEEEFFFFFFFFFFFSSSSSSEEEEEEEEEAAAAARRRRRRRRRRREEEEEEEEEDDDDDDDDLLLLLLLLAAAAAAAAAALLLLLLLLEEEEEEEEEKKKKKKKKKDDDDDDDDYYYYYYYYYYYYEEEEEEEEEEEEEEEEEEVVVVVVVGGGGMMMMMMMMDDDDDDDDSSSSSSGGGGDDDDDDDDGGGGEEEEEEEEEGGGGEEEEEEEEEGGGGAAAAAEEEEEEEEEEEEEEEEEEYYYYYYYYYYYYY

SEQ ID NO: 45 - protein, 3486 aa, Eleusine indica
MMMMMMMMRRRRRRRRRRREEEEEEEEEIIIIIIIIIIIIIIIISSSSSSIIIIIIIIHHHHHHHHHHIIIIIIIIGGGGQQQQQQQQQAAAAAGGGGIIIIIIIIQQQQQQQQQVVVVVVVGGGGNNNNNNNNAAAAACCCCCCWWWWWWWWWWWWWWEEEEEEEEELLLLLLLLYYYYYYYYYYYYCCCCCCLLLLLLLLEEEEEEEEEHHHHHHHHHHGGGGIIIIIIIIEEEEEEEEEPPPPPPPDDDDDDDDGGGGTTTTTTTMMMMMMMMPPPPPPPSSSSSSDDDDDDDDTTTTTTTSSSSSSVVVVVVVGGGGVVVVVVVAAAAAHHHHHHHHHHDDDDDDDDAAAAAFFFFFFFFFFFNNNNNNNNTTTTTTTFFFFFFFFFFFFFFFFFFFFFFSSSSSSEEEEEEEEETTTTTTTGGGGSSSSSSGGGGKKKKKKKKKHHHHHHHHHHVVVVVVVPPPPPPPRRRRRRRRRRRAAAAAIIIIIIIIFFFFFFFFFFFVVVVVVVDDDDDDDDLLLLLLLLEEEEEEEEEPPPPPPPTTTTTTTVVVVVVVIIIIIIIIDDDDDDDDEEEEEEEEEVVVVVVVRRRRRRRRRRRTTTTTTTGGGGSSSSSSYYYYYYYYYYYYRRRRRRRRRRRQQQQQQQQQLLLLLLLLFFFFFFFFFFFHHHHHHHHHHPPPPPPPEEEEEEEEEQQQQQQQQQLLLLLLLLIIIIIIIISSSSSSGGGGKKKKKKKKKEEEEEEEEEDDDDDDDDAAAAAAAAAANNNNNNNNNNNNNNNNFFFFFFFFFFFAAAAARRRRRRRRRRRGGGGHHHHHHHHHHYYYYYYYYYYYYTTTTTTTVVVVVVVGGGGKKKKKKKKKEEEEEEEEEIIIIIIIIVVVVVVVDDDDDDDDLLLLLLLLCCCCCCLLLLLLLLDDDDDDDDRRRRRRRRRRRVVVVVVVRRRRRRRRRRRKKKKKKKKKLLLLLLLLAAAAADDDDDDDDNNNNNNNNCCCCCCTTTTTTTGGGGLLLLLLLLQQQQQQQQQGGGGFFFFFFFFFFFLLLLLLLLVVVVVVVFFFFFFFFFFFNNNNNNNNAAAAAVVVVVVVGGGGGGGGGGGGTTTTTTTGGGGSSSSSSGGGGLLLLLLLLGGGGSSSSSSLLLLLLLLLLLLLLLLLLLLLLLLEEEEEEEEERRRRRRRRRRRLLLLLLLLSSSSSSVVVVVVVDDDDDDDDYYYYYYYYYYYYGGGGKKKKKKKKKKKKKKKKKKSSSSSSKKKKKKKKKLLLLLLLLGGGGFFFFFFFFFFFTTTTTTTIIIIIIIIYYYYYYYYYYYYPPPPPPPSSSSSSPPPPPPPQQQQQQQQQVVVVVVVSSSSSSTTTTTTTAAAAAVVVVVVVVVVVVVVEEEEEEEEEPPPPPPPYYYYYYYYYYYYNNNNNNNNSSSSSSVVVVVVVLLLLLLLLSSSSSSTTTTTTTHHHHHHHHHHSSSSSSLLLLLLLLLLLLLLLLEEEEEEEEEHHHHHHHHHHTTTTTTTDDDDDDDDVVVVVVVAAAAAVVVVVVVLLLLLLLLLLLLLLLLDDDDDDDDNNNNNNNNEEEEEEEEEAAAAAIIIIIIIIYYYYYYYYYYYYDDDDDDDDIIIIIIIICCCCCCRRRRRRRRRRRRRRRRRRRRRRSSSSSSLLLLLLLLDDDDDDDDIIIIIIIIEEEEEEEEERRRRRRRRRRRPPPPPPPTTTTTTTYYYYYYYYYYYYTTTTTTTNNNNNNNNLLLLLLLLNNNNNNNNRRRRRRRRRRRLLLLLLLLIIIIIIIISSSSSSQQQQQQQQQIIIIIIIIIIIIIIIISSSSSSSSSSSSLLLLLLLLTTTTTTTTTTTTTTSSSSSSLLLLLLLLRRRRRRRRRRRFFFFFFFFFFFDDDDDDDDGGGGAAAAAIIIIIIIINNNNNNNNVVVVVVVDDDDDDDDVVVVVVVTTTTTTTEEEEEEEEEFFFFFFFFFFFQQQQQQQQQTTTTTTTNNNNNNNNLLLLLLLLVVVVVVVPPPPPPPYYYYYYYYYYYYPPPPPPPRRRRRRRRRRRIIIIIIIIHHHHHHHHHHFFFFFFFFFFFMMMMMMMMLLLLLLLLSSSSSSSSSSSSYYYYYYYYYYYYAAAAAPPPPPPPVVVVVVVIIIIIIIISSSSSSAAAAAEEEEEEEEEKKKKKKKKKAAAAAYYYYYYYYYYYYHHHHHHHHHHEEEEEEEEEQQQQQQQQQLLLLLLLLSSSSSSVVVVVVVPPPPPPPEEEEEEEEEIIIIIIIITTTTTTTNNNNNNNNAAAAAVVVVVVVFFFFFFFFFFFEEEEEEEEEPPPPPPPSSSSSSSSSSSSMMMMMMMMMMMMMMMMAAAAAKKKKKKKKKCCCCCCDDDDDDDDPPPPPPPRRRRRRRRRRRHHHHHHHHHHGGGGKKKKKKKKKYYYYYYYYYYYYMMMMMMMMAAAAACCCCCCCCCCCCLLLLLLLLMMMMMMMMYYYYYYYYYYYYRRRRRRRRRRRGGGGDDDDDDDDVVVVVVVVVVVVVVPPPPPPPKKKKKKKKKDDDDDDDDVVVVVVVNNNNNNNNAAAAAAAAAAVVVVVVVAAAAATTTTTTTIIIIIIIIKKKKKKKKKTTTTTTTKKKKKKKKKRRRRRRRRRRRTTTTTTTVVVVVVVQQQQQQQQQFFFFFFFFFFFVVVVVVVDDDDDDDDWWWWWWWWWWWWWWCCCCCCPPPPPPPTTTTTTTGGGGFFFFFFFFFFFKKKKKKKKKCCCCCCGGGGIIIIIIIINNNNNNNNYYYYYYYYYYYYQQQQQQQQQPPPPPPPPPPPPPPSSSSSSVVVVVVVVVVVVVVPPPPPPPGGGGGGGGDDDDDDDDLLLLLLLLAAAAAKKKKKKKKKVVVVVVVQQQQQQQQQRRRRRRRRRRRAAAAAVVVVVVVCCCCCCMMMMMMMMIIIIIIIISSSSSSNNNNNNNNNNNNNNNNTTTTTTTAAAAAVVVVVVVAAAAAEEEEEEEEEVVVVVVVFFFFFFFFFFFSSSSSSRRRRRRRRRRRIIIIIIIIDDDDDDDDHHHHHHHHHHKKKKKKKKKFFFFFFFFFFFDDDDDDDDLLLLLLLLMMMMMMMMYYYYYYYYYYYYAAAAAKKKKKKKKKRRRRRRRRRRRAAAAAFFFFFFFFFFFVVVVVVVHHHHHHHHHHWWWWWWWWWWWWWWYYYYYYYYYYYYVVVVVVVGGGGEEEEEEEEEGGGGMMMMMMMMEEEEEEEEEEEEEEEEEEGGGGEEEEEEEEEFFFFFFFFFFFSSSSSSEEEEEEEEEAAAAARRRRRRRRRRREEEEEEEEEDDDDDDDDLLLLLLLLAAAAAAAAAALLLLLLLLEEEEEEEEEKKKKKKKKKDDDDDDDDYYYYYYYYYYYYEEEEEEEEEEEEEEEEEEVVVVVVVGGGGAAAAAEEEEEEEEEGGGGAAAAADDDDDDDDDDDDDDDDEEEEEEEEEGGGGDDDDDDDDEEEEEEEEEGGGGEEEEEEEEEDDDDDDDDYYYYYYYYYYYYY

SEQ ID NO: 46 - protein, 3514 aa, Homarus americanus
MMMMMMMMRRRRRRRRRRREEEEEEEEECCCCCCIIIIIIIISSSSSSIIIIIIIIHHHHHHHHHHVVVVVVVGGGGQQQQQQQQQAAAAAGGGGAAAAAQQQQQQQQQMMMMMMMMGGGGNNNNNNNNAAAAACCCCCCWWWWWWWWWWWWWWEEEEEEEEELLLLLLLLYYYYYYYYYYYYCCCCCCLLLLLLLLEEEEEEEEEHHHHHHHHHHGGGGIIIIIIIIQQQQQQQQQPPPPPPPDDDDDDDDGGGGQQQQQQQQQMMMMMMMMPPPPPPPSSSSSSDDDDDDDDKKKKKKKKKTTTTTTTIIIIIIIIGGGGGGGGGGGGDDDDDDDDDDDDDDDDSSSSSSFFFFFFFFFFFNNNNNNNNTTTTTTTFFFFFFFFFFFFFFFFFFFFFFCCCCCCEEEEEEEEETTTTTTTGGGGAAAAAGGGGKKKKKKKKKHHHHHHHHHHVVVVVVVPPPPPPPRRRRRRRRRRRAAAAAVVVVVVVFFFFFFFFFFFVVVVVVVDDDDDDDDLLLLLLLLEEEEEEEEEPPPPPPPTTTTTTTVVVVVVVIIIIIIIIDDDDDDDDEEEEEEEEEIIIIIIIIRRRRRRRRRRRTTTTTTTGGGGVVVVVVVYYYYYYYYYYYYRRRRRRRRRRRQQQQQQQQQLLLLLLLLFFFFFFFFFFFHHHHHHHHHHPPPPPPPEEEEEEEEEQQQQQQQQQLLLLLLLLIIIIIIIITTTTTTTGGGGKKKKKKKKKEEEEEEEEEDDDDDDDDAAAAAAAAAANNNNNNNNNNNNNNNNYYYYYYYYYYYYAAAAARRRRRRRRRRRGGGGHHHHHHHHHHYYYYYYYYYYYYTTTTTTTIIIIIIIIGGGGKKKKKKKKKEEEEEEEEEIIIIIIIIVVVVVVVDDDDDDDDIIIIIIIIVVVVVVVLLLLLLLLDDDDDDDDRRRRRRRRRRRIIIIIIIIRRRRRRRRRRRKKKKKKKKKLLLLLLLLAAAAADDDDDDDDNNNNNNNNCCCCCCAAAAAGGGGLLLLLLLLQQQQQQQQQGGGGFFFFFFFFFFFLLLLLLLLIIIIIIIIFFFFFFFFFFFHHHHHHHHHHSSSSSSFFFFFFFFFFFGGGGGGGGGGGGTTTTTTTGGGGSSSSSSGGGGFFFFFFFFFFFTTTTTTTSSSSSSLLLLLLLLLLLLLLLLMMMMMMMMEEEEEEEEERRRRRRRRRRRLLLLLLLLSSSSSSVVVVVVVDDDDDDDDYYYYYYYYYYYYGGGGKKKKKKKKKKKKKKKKKKSSSSSSKKKKKKKKKLLLLLLLLEEEEEEEEEFFFFFFFFFFFAAAAAIIIIIIIIYYYYYYYYYYYYPPPPPPPAAAAAPPPPPPPQQQQQQQQQVVVVVVVAAAAATTTTTTTAAAAAVVVVVVVVVVVVVVEEEEEEEEEPPPPPPPYYYYYYYYYYYYNNNNNNNNSSSSSSIIIIIIIILLLLLLLLTTTTTTTTTTTTTTHHHHHHHHHHTTTTTTTTTTTTTTLLLLLLLLEEEEEEEEEHHHHHHHHHHSSSSSSDDDDDDDDCCCCCCAAAAAFFFFFFFFFFFMMMMMMMMVVVVVVVDDDDDDDDNNNNNNNNEEEEEEEEEAAAAAIIIIIIIIYYYYYYYYYYYYDDDDDDDDIIIIIIIICCCCCCRRRRRRRRRRRRRRRRRRRRRRNNNNNNNNLLLLLLLLDDDDDDDDIIIIIIIIEEEEEEEEERRRRRRRRRRRPPPPPPPTTTTTTTYYYYYYYYYYYYTTTTTTTNNNNNNNNLLLLLLLLNNNNNNNNRRRRRRRRRRRLLLLLLLLIIIIIIIIGGGGQQQQQQQQQIIIIIIIIVVVVVVVSSSSSSSSSSSSIIIIIIIITTTTTTTAAAAASSSSSSLLLLLLLLRRRRRRRRRRRFFFFFFFFFFFDDDDDDDDGGGGAAAAALLLLLLLLNNNNNNNNVVVVVVVDDDDDDDDLLLLLLLLTTTTTTTEEEEEEEEEFFFFFFFFFFFQQQQQQQQQTTTTTTTNNNNNNNNLLLLLLLLVVVVVVVPPPPPPPYYYYYYYYYYYYPPPPPPPRRRRRRRRRRRIIIIIIIIHHHHHHHHHHFFFFFFFFFFFPPPPPPPLLLLLLLLVVVVVVVTTTTTTTYYYYYYYYYYYYAAAAAPPPPPPPVVVVVVVIIIIIIIISSSSSSAAAAAEEEEEEEEEKKKKKKKKKAAAAAYYYYYYYYYYYYHHHHHHHHHHEEEEEEEEEQQQQQQQQQLLLLLLLLSSSSSSVVVVVVVSSSSSSEEEEEEEEEIIIIIIIITTTTTTTNNNNNNNNAAAAACCCCCCFFFFFFFFFFFEEEEEEEEEPPPPPPPAAAAANNNNNNNNQQQQQQQQQMMMMMMMMVVVVVVVKKKKKKKKKCCCCCCDDDDDDDDPPPPPPPRRRRRRRRRRRHHHHHHHHHHGGGGKKKKKKKKKYYYYYYYYYYYYMMMMMMMMAAAAACCCCCCCCCCCCLLLLLLLLLLLLLLLLYYYYYYYYYYYYRRRRRRRRRRRGGGGDDDDDDDDVVVVVVVVVVVVVVPPPPPPPKKKKKKKKKDDDDDDDDVVVVVVVNNNNNNNNAAAAAAAAAAIIIIIIIIAAAAATTTTTTTIIIIIIIIKKKKKKKKKTTTTTTTKKKKKKKKKRRRRRRRRRRRSSSSSSIIIIIIIIQQQQQQQQQFFFFFFFFFFFVVVVVVVDDDDDDDDWWWWWWWWWWWWWWCCCCCCPPPPPPPTTTTTTTGGGGFFFFFFFFFFFKKKKKKKKKVVVVVVVGGGGIIIIIIIINNNNNNNNYYYYYYYYYYYYQQQQQQQQQPPPPPPPPPPPPPPTTTTTTTAAAAAVVVVVVVPPPPPPPGGGGGGGGDDDDDDDDLLLLLLLLAAAAAKKKKKKKKKVVVVVVVSSSSSSRRRRRRRRRRRAAAAAVVVVVVVCCCCCCMMMMMMMMLLLLLLLLSSSSSSNNNNNNNNTTTTTTTTTTTTTTAAAAAIIIIIIIIAAAAAEEEEEEEEEAAAAAWWWWWWWWWWWWWWAAAAARRRRRRRRRRRLLLLLLLLDDDDDDDDHHHHHHHHHHKKKKKKKKKFFFFFFFFFFFDDDDDDDDLLLLLLLLMMMMMMMMYYYYYYYYYYYYAAAAAKKKKKKKKKRRRRRRRRRRRAAAAAFFFFFFFFFFFVVVVVVVHHHHHHHHHHWWWWWWWWWWWWWWYYYYYYYYYYYYVVVVVVVGGGGEEEEEEEEEGGGGMMMMMMMMEEEEEEEEEEEEEEEEEEGGGGEEEEEEEEEFFFFFFFFFFFTTTTTTTEEEEEEEEEAAAAARRRRRRRRRRREEEEEEEEEDDDDDDDDLLLLLLLLAAAAAAAAAALLLLLLLLEEEEEEEEEKKKKKKKKKDDDDDDDDYYYYYYYYYYYYEEEEEEEEEEEEEEEEEEVVVVVVVGGGGVVVVVVVDDDDDDDDSSSSSSAAAAADDDDDDDDAAAAAEEEEEEEEEGGGGEEEEEEEEEEEEEEEEEEEEEEEEEEEGGGGEEEEEEEEEEEEEEEEEEYYYYYYYYYYYYY

SEQ ID NO: 47 - protein, 3493 aa, Hordeum vulgare
MMMMMMMMRRRRRRRRRRREEEEEEEEECCCCCCIIIIIIIISSSSSSIIIIIIIIHHHHHHHHHHIIIIIIIIGGGGQQQQQQQQQAAAAAGGGGIIIIIIIIQQQQQQQQQVVVVVVVGGGGNNNNNNNNAAAAACCCCCCWWWWWWWWWWWWWWEEEEEEEEELLLLLLLLYYYYYYYYYYYYCCCCCCLLLLLLLLEEEEEEEEEHHHHHHHHHHGGGGIIIIIIIIQQQQQQQQQPPPPPPPDDDDDDDDGGGGQQQQQQQQQMMMMMMMMPPPPPPPGGGGDDDDDDDDKKKKKKKKKTTTTTTTVVVVVVVGGGGGGGGGGGGDDDDDDDDDDDDDDDDAAAAAFFFFFFFFFFFNNNNNNNNTTTTTTTFFFFFFFFFFFFFFFFFFFFFFSSSSSSEEEEEEEEETTTTTTTGGGGAAAAAGGGGKKKKKKKKKHHHHHHHHHHVVVVVVVPPPPPPPRRRRRRRRRRRAAAAAVVVVVVVFFFFFFFFFFFVVVVVVVDDDDDDDDLLLLLLLLEEEEEEEEEPPPPPPPTTTTTTTVVVVVVVIIIIIIIIDDDDDDDDEEEEEEEEEVVVVVVVRRRRRRRRRRRTTTTTTTGGGGTTTTTTTYYYYYYYYYYYYRRRRRRRRRRRQQQQQQQQQLLLLLLLLFFFFFFFFFFFHHHHHHHHHHPPPPPPPEEEEEEEEEQQQQQQQQQLLLLLLLLIIIIIIIISSSSSSGGGGKKKKKKKKKEEEEEEEEEDDDDDDDDAAAAAAAAAANNNNNNNNNNNNNNNNFFFFFFFFFFFAAAAARRRRRRRRRRRGGGGHHHHHHHHHHYYYYYYYYYYYYTTTTTTTIIIIIIIIGGGGKKKKKKKKKEEEEEEEEEIIIIIIIIVVVVVVVDDDDDDDDLLLLLLLLCCCCCCLLLLLLLLDDDDDDDDRRRRRRRRRRRIIIIIIIIRRRRRRRRRRRKKKKKKKKKLLLLLLLLAAAAADDDDDDDDNNNNNNNNCCCCCCTTTTTTTGGGGLLLLLLLLQQQQQQQQQGGGGFFFFFFFFFFFLLLLLLLLVVVVVVVFFFFFFFFFFFNNNNNNNNAAAAAVVVVVVVGGGGGGGGGGGGTTTTTTTGGGGSSSSSSGGGGLLLLLLLLGGGGSSSSSSLLLLLLLLLLLLLLLLLLLLLLLLEEEEEEEEERRRRRRRRRRRLLLLLLLLSSSSSSVVVVVVVDDDDDDDDYYYYYYYYYYYYGGGGKKKKKKKKKKKKKKKKKKSSSSSSKKKKKKKKKLLLLLLLLGGGGFFFFFFFFFFFTTTTTTTVVVVVVVYYYYYYYYYYYYPPPPPPPSSSSSSPPPPPPPQQQQQQQQQVVVVVVVSSSSSSTTTTTTTSSSSSSVVVVVVVVVVVVVVEEEEEEEEEPPPPPPPYYYYYYYYYYYYNNNNNNNNSSSSSSVVVVVVVLLLLLLLLSSSSSSTTTTTTTHHHHHHHHHHSSSSSSLLLLLLLLLLLLLLLLEEEEEEEEEHHHHHHHHHHTTTTTTTDDDDDDDDVVVVVVVAAAAAVVVVVVVLLLLLLLLLLLLLLLLDDDDDDDDNNNNNNNNEEEEEEEEEAAAAAIIIIIIIIYYYYYYYYYYYYDDDDDDDDIIIIIIIICCCCCCRRRRRRRRRRRRRRRRRRRRRRSSSSSSLLLLLLLLDDDDDDDDIIIIIIIIEEEEEEEEERRRRRRRRRRRPPPPPPPTTTTTTTYYYYYYYYYYYYTTTTTTTNNNNNNNNLLLLLLLLNNNNNNNNRRRRRRRRRRRLLLLLLLLVVVVVVVSSSSSSQQQQQQQQQVVVVVVVIIIIIIIISSSSSSSSSSSSLLLLLLLLTTTTTTTAAAAASSSSSSLLLLLLLLRRRRRRRRRRRFFFFFFFFFFFDDDDDDDDGGGGAAAAALLLLLLLLNNNNNNNNVVVVVVVDDDDDDDDVVVVVVVNNNNNNNNEEEEEEEEEFFFFFFFFFFFQQQQQQQQQTTTTTTTNNNNNNNNLLLLLLLLVVVVVVVPPPPPPPYYYYYYYYYYYYPPPPPPPRRRRRRRRRRRIIIIIIIIHHHHHHHHHHFFFFFFFFFFFMMMMMMMMLLLLLLLLSSSSSSSSSSSSYYYYYYYYYYYYAAAAAPPPPPPPVVVVVVVIIIIIIIISSSSSSAAAAAEEEEEEEEEKKKKKKKKKAAAAAYYYYYYYYYYYYHHHHHHHHHHEEEEEEEEEQQQQQQQQQLLLLLLLLSSSSSSVVVVVVVAAAAAEEEEEEEEEIIIIIIIITTTTTTTNNNNNNNNSSSSSSAAAAAFFFFFFFFFFFEEEEEEEEEPPPPPPPSSSSSSSSSSSSMMMMMMMMMMMMMMMMAAAAAKKKKKKKKKCCCCCCDDDDDDDDPPPPPPPRRRRRRRRRRRHHHHHHHHHHGGGGKKKKKKKKKYYYYYYYYYYYYMMMMMMMMAAAAACCCCCCCCCCCCLLLLLLLLMMMMMMMMYYYYYYYYYYYYRRRRRRRRRRRGGGGDDDDDDDDVVVVVVVVVVVVVVPPPPPPPKKKKKKKKKDDDDDDDDVVVVVVVNNNNNNNNAAAAAAAAAAVVVVVVVAAAAATTTTTTTIIIIIIIIKKKKKKKKKTTTTTTTKKKKKKKKKRRRRRRRRRRRTTTTTTTIIIIIIIIQQQQQQQQQFFFFFFFFFFFVVVVVVVDDDDDDDDWWWWWWWWWWWWWWCCCCCCPPPPPPPTTTTTTTGGGGFFFFFFFFFFFKKKKKKKKKCCCCCCGGGGIIIIIIIINNNNNNNNYYYYYYYYYYYYQQQQQQQQQPPPPPPPPPPPPPPSSSSSSVVVVVVVVVVVVVVPPPPPPPGGGGGGGGDDDDDDDDLLLLLLLLAAAAAKKKKKKKKKVVVVVVVQQQQQQQQQRRRRRRRRRRRAAAAAVVVVVVVCCCCCCMMMMMMMMIIIIIIIISSSSSSNNNNNNNNSSSSSSTTTTTTTSSSSSSVVVVVVVVVVVVVVEEEEEEEEEVVVVVVVFFFFFFFFFFFSSSSSSRRRRRRRRRRRIIIIIIIIDDDDDDDDHHHHHHHHHHKKKKKKKKKFFFFFFFFFFFDDDDDDDDLLLLLLLLMMMMMMMMYYYYYYYYYYYYAAAAAKKKKKKKKKRRRRRRRRRRRAAAAAFFFFFFFFFFFVVVVVVVHHHHHHHHHHWWWWWWWWWWWWWWYYYYYYYYYYYYVVVVVVVGGGGEEEEEEEEEGGGGMMMMMMMMEEEEEEEEEEEEEEEEEEGGGGEEEEEEEEEFFFFFFFFFFFSSSSSSEEEEEEEEEAAAAARRRRRRRRRRREEEEEEEEEDDDDDDDDLLLLLLLLAAAAAAAAAALLLLLLLLEEEEEEEEEKKKKKKKKKDDDDDDDDYYYYYYYYYYYYEEEEEEEEEEEEEEEEEEVVVVVVVGGGGAAAAAEEEEEEEEEFFFFFFFFFFFDDDDDDDDEEEEEEEEEGGGGEEEEEEEEEDDDDDDDDGGGGDDDDDDDDEEEEEEEEEGGGGDDDDDDDDEEEEEEEEEYYYYYYYYYYYYY

SEQ ID NO: 48 - protein, 3482 aa, Zea mays
MMMMMMMMRRRRRRRRRRREEEEEEEEECCCCCCIIIIIIIISSSSSSVVVVVVVHHHHHHHHHHIIIIIIIIGGGGQQQQQQQQQAAAAAGGGGIIIIIIIIQQQQQQQQQVVVVVVVGGGGNNNNNNNNAAAAACCCCCCWWWWWWWWWWWWWWEEEEEEEEELLLLLLLLYYYYYYYYYYYYCCCCCCLLLLLLLLEEEEEEEEEHHHHHHHHHHGGGGIIIIIIIIQQQQQQQQQPPPPPPPDDDDDDDDGGGGQQQQQQQQQVVVVVVVPPPPPPPGGGGDDDDDDDDKKKKKKKKKTTTTTTTAAAAAGGGGHHHHHHHHHHHHHHHHHHHHDDDDDDDDDDDDDDDDAAAAAFFFFFFFFFFFSSSSSSTTTTTTTFFFFFFFFFFFFFFFFFFFFFFSSSSSSQQQQQQQQQTTTTTTTGGGGAAAAAGGGGKKKKKKKKKHHHHHHHHHHVVVVVVVPPPPPPPRRRRRRRRRRRAAAAAIIIIIIIIFFFFFFFFFFFVVVVVVVDDDDDDDDLLLLLLLLEEEEEEEEEPPPPPPPTTTTTTTVVVVVVVIIIIIIIIDDDDDDDDEEEEEEEEEVVVVVVVRRRRRRRRRRRTTTTTTTGGGGTTTTTTTYYYYYYYYYYYYRRRRRRRRRRRQQQQQQQQQLLLLLLLLFFFFFFFFFFFHHHHHHHHHHPPPPPPPEEEEEEEEEQQQQQQQQQLLLLLLLLIIIIIIIISSSSSSGGGGKKKKKKKKKEEEEEEEEEDDDDDDDDAAAAAAAAAANNNNNNNNNNNNNNNNFFFFFFFFFFFAAAAARRRRRRRRRRRGGGGHHHHHHHHHHYYYYYYYYYYYYTTTTTTTIIIIIIIIGGGGKKKKKKKKKEEEEEEEEEIIIIIIIIVVVVVVVDDDDDDDDLLLLLLLLCCCCCCLLLLLLLLDDDDDDDDRRRRRRRRRRRIIIIIIIIRRRRRRRRRRRKKKKKKKKKLLLLLLLLAAAAADDDDDDDDNNNNNNNNCCCCCCTTTTTTTGGGGLLLLLLLLQQQQQQQQQGGGGFFFFFFFFFFFLLLLLLLLVVVVVVVFFFFFFFFFFFNNNNNNNNAAAAAVVVVVVVGGGGGGGGGGGGTTTTTTTGGGGSSSSSSGGGGLLLLLLLLGGGGSSSSSSLLLLLLLLLLLLLLLLLLLLLLLLEEEEEEEEERRRRRRRRRRRLLLLLLLLSSSSSSVVVVVVVEEEEEEEEEYYYYYYYYYYYYGGGGKKKKKKKKKKKKKKKKKKSSSSSSKKKKKKKKKLLLLLLLLGGGGFFFFFFFFFFFTTTTTTTVVVVVVVYYYYYYYYYYYYPPPPPPPSSSSSSPPPPPPPQQQQQQQQQVVVVVVVSSSSSSTTTTTTTSSSSSSVVVVVVVVVVVVVVEEEEEEEEEPPPPPPPYYYYYYYYYYYYNNNNNNNNSSSSSSVVVVVVVLLLLLLLLSSSSSSTTTTTTTHHHHHHHHHHSSSSSSLLLLLLLLLLLLLLLLEEEEEEEEEHHHHHHHHHHTTTTTTTDDDDDDDDVVVVVVVSSSSSSIIIIIIIILLLLLLLLLLLLLLLLDDDDDDDDNNNNNNNNEEEEEEEEEAAAAAIIIIIIIIYYYYYYYYYYYYDDDDDDDDIIIIIIIICCCCCCRRRRRRRRRRRRRRRRRRRRRRSSSSSSLLLLLLLLDDDDDDDDIIIIIIIIEEEEEEEEERRRRRRRRRRRPPPPPPPNNNNNNNNYYYYYYYYYYYYSSSSSSNNNNNNNNLLLLLLLLNNNNNNNNRRRRRRRRRRRLLLLLLLLVVVVVVVSSSSSSQQQQQQQQQVVVVVVVIIIIIIIISSSSSSSSSSSSLLLLLLLLTTTTTTTAAAAASSSSSSLLLLLLLLRRRRRRRRRRRFFFFFFFFFFFDDDDDDDDGGGGAAAAALLLLLLLLNNNNNNNNVVVVVVVDDDDDDDDVVVVVVVNNNNNNNNEEEEEEEEEFFFFFFFFFFFQQQQQQQQQTTTTTTTNNNNNNNNLLLLLLLLVVVVVVVPPPPPPPYYYYYYYYYYYYPPPPPPPRRRRRRRRRRRIIIIIIIIHHHHHHHHHHFFFFFFFFFFFMMMMMMMMLLLLLLLLSSSSSSSSSSSSYYYYYYYYYYYYAAAAAPPPPPPPVVVVVVVIIIIIIIISSSSSSSSSSSSAAAAAKKKKKKKKKAAAAAFFFFFFFFFFFHHHHHHHHHHEEEEEEEEEQQQQQQQQQLLLLLLLLSSSSSSVVVVVVVAAAAAEEEEEEEEEIIIIIIIITTTTTTTSSSSSSSSSSSSAAAAAFFFFFFFFFFFEEEEEEEEEPPPPPPPAAAAASSSSSSMMMMMMMMMMMMMMMMVVVVVVVKKKKKKKKKCCCCCCDDDDDDDDPPPPPPPRRRRRRRRRRRHHHHHHHHHHGGGGKKKKKKKKKYYYYYYYYYYYYMMMMMMMMAAAAACCCCCCCCCCCCLLLLLLLLMMMMMMMMYYYYYYYYYYYYRRRRRRRRRRRGGGGDDDDDDDDVVVVVVVVVVVVVVPPPPPPPKKKKKKKKKDDDDDDDDVVVVVVVNNNNNNNNAAAAAAAAAAVVVVVVVAAAAATTTTTTTIIIIIIIIKKKKKKKKKTTTTTTTKKKKKKKKKRRRRRRRRRRRTTTTTTTIIIIIIIIQQQQQQQQQFFFFFFFFFFFVVVVVVVDDDDDDDDWWWWWWWWWWWWWWCCCCCCPPPPPPPTTTTTTTGGGGFFFFFFFFFFFKKKKKKKKKCCCCCCGGGGIIIIIIIINNNNNNNNYYYYYYYYYYYYQQQQQQQQQAAAAAPPPPPPPTTTTTTTVVVVVVVVVVVVVVPPPPPPPGGGGAAAAADDDDDDDDLLLLLLLLAAAAAKKKKKKKKKVVVVVVVQQQQQQQQQRRRRRRRRRRRAAAAAVVVVVVVCCCCCCMMMMMMMMIIIIIIIISSSSSSNNNNNNNNSSSSSSTTTTTTTSSSSSSVVVVVVVVVVVVVVEEEEEEEEEVVVVVVVFFFFFFFFFFFSSSSSSRRRRRRRRRRRIIIIIIIINNNNNNNNSSSSSSKKKKKKKKKFFFFFFFFFFFDDDDDDDDLLLLLLLLMMMMMMMMYYYYYYYYYYYYAAAAAKKKKKKKKKRRRRRRRRRRRAAAAAFFFFFFFFFFFVVVVVVVHHHHHHHHHHWWWWWWWWWWWWWWYYYYYYYYYYYYVVVVVVVGGGGEEEEEEEEEGGGGMMMMMMMMEEEEEEEEEEEEEEEEEEGGGGEEEEEEEEEFFFFFFFFFFFSSSSSSEEEEEEEEEAAAAARRRRRRRRRRREEEEEEEEEDDDDDDDDLLLLLLLLAAAAAAAAAALLLLLLLLEEEEEEEEEKKKKKKKKKDDDDDDDDYYYYYYYYYYYYEEEEEEEEEEEEEEEEEEVVVVVVVAAAAAAAAAAEEEEEEEEEGGGGGGGGSSSSSSDDDDDDDDDDDDDDDDGGGGDDDDDDDDEEEEEEEEEEEEEEEEEEEEEEEEEEEEEEEEEEEEYYYYYYYYYYYYY

SEQ ID NO: 49 - protein, 3512 aa, Mus musculus; identical to SEQ ID NO: 34

SEQ ID NO: 50 - protein, 3494 aa, Saccharomyces cerevisiae
MMMMMMMMRRRRRRRRRRREEEEEEEEEVVVVVVVIIIIIIIISSSSSSIIIIIIIINNNNNNNNVVVVVVVGGGGQQQQQQQQQAAAAAGGGGCCCCCCQQQQQQQQQIIIIIIIIGGGGNNNNNNNNAAAAACCCCCCWWWWWWWWWWWWWWEEEEEEEEELLLLLLLLYYYYYYYYYYYYSSSSSSLLLLLLLLEEEEEEEEEHHHHHHHHHHGGGGIIIIIIIIKKKKKKKKKEEEEEEEEEDDDDDDDDGGGGHHHHHHHHHHLLLLLLLLEEEEEEEEEDDDDDDDDGGGGLLLLLLLLSSSSSSKKKKKKKKKPPPPPPPKKKKKKKKKGGGGGGGGEEEEEEEEEEEEEEEEEEGGGGFFFFFFFFFFFSSSSSSTTTTTTTFFFFFFFFFFFFFFFFFFFFFFHHHHHHHHHHEEEEEEEEETTTTTTTGGGGYYYYYYYYYYYYGGGGKKKKKKKKKFFFFFFFFFFFVVVVVVVPPPPPPPRRRRRRRRRRRAAAAAIIIIIIIIYYYYYYYYYYYYVVVVVVVDDDDDDDDLLLLLLLLEEEEEEEEEPPPPPPPNNNNNNNNVVVVVVVIIIIIIIIDDDDDDDDEEEEEEEEEVVVVVVVRRRRRRRRRRRTTTTTTTGGGGRRRRRRRRRRRFFFFFFFFFFFKKKKKKKKKEEEEEEEEELLLLLLLLFFFFFFFFFFFHHHHHHHHHHPPPPPPPEEEEEEEEEQQQQQQQQQLLLLLLLLIIIIIIIINNNNNNNNGGGGKKKKKKKKKEEEEEEEEEDDDDDDDDAAAAAAAAAANNNNNNNNNNNNNNNNYYYYYYYYYYYYAAAAARRRRRRRRRRRGGGGHHHHHHHHHHYYYYYYYYYYYYTTTTTTTVVVVVVVGGGGRRRRRRRRRRREEEEEEEEEIIIIIIIIVVVVVVVDDDDDDDDEEEEEEEEEVVVVVVVEEEEEEEEEEEEEEEEEERRRRRRRRRRRIIIIIIIIRRRRRRRRRRRKKKKKKKKKMMMMMMMMAAAAADDDDDDDDQQQQQQQQQCCCCCCDDDDDDDDGGGGLLLLLLLLQQQQQQQQQGGGGFFFFFFFFFFFLLLLLLLLFFFFFFFFFFFTTTTTTTHHHHHHHHHHSSSSSSLLLLLLLLGGGGGGGGGGGGTTTTTTTGGGGSSSSSSGGGGLLLLLLLLGGGGSSSSSSLLLLLLLLLLLLLLLLLLLLLLLLEEEEEEEEENNNNNNNNLLLLLLLLSSSSSSYYYYYYYYYYYYEEEEEEEEEYYYYYYYYYYYYGGGGKKKKKKKKKKKKKKKKKKSSSSSSKKKKKKKKKLLLLLLLLEEEEEEEEEFFFFFFFFFFFAAAAAVVVVVVVYYYYYYYYYYYYPPPPPPPAAAAAPPPPPPPQQQQQQQQQLLLLLLLLSSSSSSTTTTTTTSSSSSSVVVVVVVVVVVVVVEEEEEEEEEPPPPPPPYYYYYYYYYYYYNNNNNNNNTTTTTTTVVVVVVVLLLLLLLLTTTTTTTTTTTTTTHHHHHHHHHHTTTTTTTTTTTTTTLLLLLLLLEEEEEEEEEHHHHHHHHHHAAAAADDDDDDDDCCCCCCTTTTTTTFFFFFFFFFFFMMMMMMMMVVVVVVVDDDDDDDDNNNNNNNNEEEEEEEEEAAAAAIIIIIIIIYYYYYYYYYYYYDDDDDDDDIIIIIIIICCCCCCKKKKKKKKKRRRRRRRRRRRNNNNNNNNLLLLLLLLGGGGIIIIIIIISSSSSSRRRRRRRRRRRPPPPPPPSSSSSSFFFFFFFFFFFSSSSSSNNNNNNNNLLLLLLLLNNNNNNNNGGGGLLLLLLLLIIIIIIIIAAAAAQQQQQQQQQVVVVVVVIIIIIIIISSSSSSSSSSSSVVVVVVVTTTTTTTAAAAASSSSSSLLLLLLLLRRRRRRRRRRRFFFFFFFFFFFDDDDDDDDGGGGSSSSSSLLLLLLLLNNNNNNNNVVVVVVVDDDDDDDDLLLLLLLLNNNNNNNNEEEEEEEEEFFFFFFFFFFFQQQQQQQQQTTTTTTTNNNNNNNNLLLLLLLLVVVVVVVPPPPPPPYYYYYYYYYYYYPPPPPPPRRRRRRRRRRRIIIIIIIIHHHHHHHHHHFFFFFFFFFFFPPPPPPPLLLLLLLLVVVVVVVSSSSSSYYYYYYYYYYYYAAAAAPPPPPPPIIIIIIIILLLLLLLLSSSSSSKKKKKKKKKKKKKKKKKKRRRRRRRRRRRAAAAATTTTTTTHHHHHHHHHHEEEEEEEEESSSSSSNNNNNNNNSSSSSSVVVVVVVSSSSSSEEEEEEEEEIIIIIIIITTTTTTTNNNNNNNNAAAAACCCCCCFFFFFFFFFFFEEEEEEEEEPPPPPPPGGGGNNNNNNNNQQQQQQQQQMMMMMMMMVVVVVVVKKKKKKKKKCCCCCCDDDDDDDDPPPPPPPTTTTTTTKKKKKKKKKGGGGKKKKKKKKKYYYYYYYYYYYYMMMMMMMMAAAAANNNNNNNNCCCCCCLLLLLLLLLLLLLLLLYYYYYYYYYYYYRRRRRRRRRRRGGGGDDDDDDDDVVVVVVVVVVVVVVTTTTTTTRRRRRRRRRRRDDDDDDDDVVVVVVVQQQQQQQQQRRRRRRRRRRRAAAAAVVVVVVVEEEEEEEEEQQQQQQQQQVVVVVVVKKKKKKKKKNNNNNNNNKKKKKKKKKKKKKKKKKKTTTTTTTVVVVVVVQQQQQQQQQMMMMMMMMVVVVVVVDDDDDDDDWWWWWWWWWWWWWWCCCCCCPPPPPPPTTTTTTTGGGGFFFFFFFFFFFKKKKKKKKKIIIIIIIIGGGGIIIIIIIICCCCCCYYYYYYYYYYYYEEEEEEEEEPPPPPPPPPPPPPPSSSSSSVVVVVVVIIIIIIIIPPPPPPPSSSSSSSSSSSSEEEEEEEEELLLLLLLLAAAAANNNNNNNNVVVVVVVDDDDDDDDRRRRRRRRRRRAAAAAVVVVVVVCCCCCCMMMMMMMMLLLLLLLLSSSSSSNNNNNNNNTTTTTTTTTTTTTTAAAAAIIIIIIIIAAAAADDDDDDDDAAAAAWWWWWWWWWWWWWWKKKKKKKKKRRRRRRRRRRRIIIIIIIIDDDDDDDDQQQQQQQQQKKKKKKKKKFFFFFFFFFFFDDDDDDDDLLLLLLLLMMMMMMMMYYYYYYYYYYYYAAAAAKKKKKKKKKRRRRRRRRRRRAAAAAFFFFFFFFFFFVVVVVVVHHHHHHHHHHWWWWWWWWWWWWWWYYYYYYYYYYYYVVVVVVVGGGGEEEEEEEEEGGGGMMMMMMMMEEEEEEEEEEEEEEEEEEGGGGEEEEEEEEEFFFFFFFFFFFTTTTTTTEEEEEEEEEAAAAARRRRRRRRRRREEEEEEEEEDDDDDDDDLLLLLLLLAAAAAAAAAALLLLLLLLEEEEEEEEERRRRRRRRRRRDDDDDDDDYYYYYYYYYYYYIIIIIIIIEEEEEEEEEVVVVVVVGGGGAAAAADDDDDDDDSSSSSSYYYYYYYYYYYYAAAAAEEEEEEEEEEEEEEEEEEFFFFFFFFFFFF

SEQ ID NO: 51 - protein, 2523 aa, Gallus gallus
AAAAADDDDDDDDAAAAACCCCCCSSSSSSGGGGLLLLLLLLQQQQQQQQQGGGGFFFFFFFFFFFLLLLLLLLIIIIIIIIFFFFFFFFFFFHHHHHHHHHHSSSSSSFFFFFFFFFFFGGGGGGGGGGGGTTTTTTTGGGGSSSSSSGGGGFFFFFFFFFFFTTTTTTTSSSSSSLLLLLLLLLLLLLLLLMMMMMMMMEEEEEEEEERRRRRRRRRRRLLLLLLLLSSSSSSVVVVVVVDDDDDDDDYYYYYYYYYYYYGGGGKKKKKKKKKKKKKKKKKKSSSSSSKKKKKKKKKLLLLLLLLEEEEEEEEEFFFFFFFFFFFAAAAAIIIIIIIIYYYYYYYYYYYYPPPPPPPAAAAAPPPPPPPQQQQQQQQQVVVVVVVSSSSSSTTTTTTTAAAAAVVVVVVVVVVVVVVEEEEEEEEEPPPPPPPYYYYYYYYYYYYNNNNNNNNSSSSSSIIIIIIIILLLLLLLLTTTTTTTTTTTTTTHHHHHHHHHHTTTTTTTTTTTTTTLLLLLLLLEEEEEEEEEHHHHHHHHHHSSSSSSDDDDDDDDCCCCCCAAAAAFFFFFFFFFFFMMMMMMMMVVVVVVVDDDDDDDDNNNNNNNNEEEEEEEEEAAAAAIIIIIIIIYYYYYYYYYYYYDDDDDDDDIIIIIIIICCCCCCCCCCCCRRRRRRRRRRRNNNNNNNNLLLLLLLLDDDDDDDDIIIIIIIIEEEEEEEEERRRRRRRRRRRPPPPPPPTTTTTTTYYYYYYYYYYYYTTTTTTTNNNNNNNNLLLLLLLLNNNNNNNNRRRRRRRRRRRLLLLLLLLIIIIIIIISSSSSSQQQQQQQQQIIIIIIIIVVVVVVVSSSSSSSSSSSSIIIIIIIITTTTTTTAAAAASSSSSSLLLLLLLLRRRRRRRRRRRFFFFFFFFFFFDDDDDDDDGGGGAAAAALLLLLLLLNNNNNNNNVVVVVVVDDDDDDDDLLLLLLLLTTTTTTTEEEEEEEEEFFFFFFFFFFFQQQQQQQQQTTTTTTTNNNNNNNNLLLLLLLLVVVVVVVPPPPPPPYYYYYYYYYYYYPPPPPPPRRRRRRRRRRRIIIIIIIIHHHHHHHHHHFFFFFFFFFFFPPPPPPPLLLLLLLLVVVVVVVTTTTTTTYYYYYYYYYYYYAAAAAPPPPPPPIIIIIIIIIIIIIIIISSSSSSSSSSSSEEEEEEEEERRRRRRRRRRRAAAAAYYYYYYYYYYYYHHHHHHHHHHEEEEEEEEEQQQQQQQQQLLLLLLLLSSSSSSVVVVVVVAAAAAEEEEEEEEEIIIIIIIITTTTTTTSSSSSSSSSSSSCCCCCCFFFFFFFFFFFEEEEEEEEEPPPPPPPNNNNNNNNNNNNNNNNQQQQQQQQQMMMMMMMMVVVVVVVKKKKKKKKKCCCCCCDDDDDDDDPPPPPPPRRRRRRRRRRRHHHHHHHHHHGGGGKKKKKKKKKYYYYYYYYYYYYMMMMMMMMAAAAACCCCCCCCCCCCMMMMMMMMLLLLLLLLYYYYYYYYYYYYRRRRRRRRRRRGGGGDDDDDDDDVVVVVVVVVVVVVVPPPPPPPKKKKKKKKKDDDDDDDDVVVVVVVNNNNNNNNVVVVVVVAAAAAIIIIIIIIAAAAAAAAAAIIIIIIIIKKKKKKKKKTTTTTTTKKKKKKKKKRRRRRRRRRRRNNNNNNNNIIIIIIIIQQQQQQQQQFFFFFFFFFFFVVVVVVVDDDDDDDDWWWWWWWWWWWWWWCCCCCCPPPPPPPTTTTTTTGGGGVVVVVVVKKKKKKKKKVVVVVVVGGGGIIIIIIIINNNNNNNNYYYYYYYYYYYYQQQQQQQQQPPPPPPPPPPPPPPTTTTTTTVVVVVVVVVVVVVVPPPPPPPGGGGGGGGDDDDDDDDLLLLLLLLAAAAAQQQQQQQQQVVVVVVVQQQQQQQQQRRRRRRRRRRRAAAAAVVVVVVVCCCCCCMMMMMMMMLLLLLLLLSSSSSSNNNNNNNNTTTTTTTTTTTTTTAAAAAIIIIIIIIAAAAAEEEEEEEEEAAAAAWWWWWWWWWWWWWWAAAAARRRRRRRRRRRLLLLLLLLDDDDDDDDHHHHHHHHHHKKKKKKKKKFFFFFFFFFFFDDDDDDDDLLLLLLLLMMMMMMMMYYYYYYYYYYYYAAAAAKKKKKKKKKRRRRRRRRRRRAAAAAFFFFFFFFFFFVVVVVVVHHHHHHHHHHWWWWWWWWWWWWWWYYYYYYYYYYYYVVVVVVVSSSSSSEEEEEEEEEGGGGMMMMMMMMEEEEEEEEEEEEEEEEEEGGGGEEEEEEEEEFFFFFFFFFFFAAAAAEEEEEEEEEAAAAARRRRRRRRRRREEEEEEEEEDDDDDDDDLLLLLLLLAAAAAAAAAALLLLLLLLEEEEEEEEEKKKKKKKKKDDDDDDDDYYYYYYYYYYYYEEEEEEEEEEEEEEEEEEVVVVVVVGGGGTTTTTTTDDDDDDDDSSSSSSFFFFFFFFFFFEEEEEEEEEDDDDDDDDEEEEEEEEENNNNNNNNDDDDDDDDEEEEEEEEEEEEEEEEEEE

SEQ ID NO: 52 - protein, 3588 aa, Drosophila melanogaster
MMMMMMMMRRRRRRRRRRREEEEEEEEEVVVVVVVVVVVVVVSSSSSSIIIIIIIIQQQQQQQQQIIIIIIIIGGGGQQQQQQQQQCCCCCCGGGGIIIIIIIIQQQQQQQQQIIIIIIIIGGGGNNNNNNNNAAAAACCCCCCWWWWWWWWWWWWWWEEEEEEEEELLLLLLLLYYYYYYYYYYYYLLLLLLLLLLLLLLLLEEEEEEEEEHHHHHHHHHHGGGGIIIIIIIINNNNNNNNLLLLLLLLDDDDDDDDGGGGSSSSSSLLLLLLLLKKKKKKKKKTTTTTTTKKKKKKKKKEEEEEEEEEEEEEEEEEELLLLLLLLTTTTTTTAAAAASSSSSSGGGGSSSSSSSSSSSSAAAAASSSSSSVVVVVVVGGGGHHHHHHHHHHDDDDDDDDTTTTTTTSSSSSSAAAAANNNNNNNNDDDDDDDDAAAAARRRRRRRRRRRTTTTTTTFFFFFFFFFFFFFFFFFFFFFFTTTTTTTEEEEEEEEETTTTTTTGGGGNNNNNNNNGGGGKKKKKKKKKQQQQQQQQQVVVVVVVPPPPPPPRRRRRRRRRRRSSSSSSIIIIIIIIFFFFFFFFFFFVVVVVVVDDDDDDDDLLLLLLLLEEEEEEEEEPPPPPPPTTTTTTTVVVVVVVIIIIIIIIDDDDDDDDDDDDDDDDVVVVVVVRRRRRRRRRRRNNNNNNNNGGGGCCCCCCMMMMMMMMRRRRRRRRRRREEEEEEEEELLLLLLLLYYYYYYYYYYYYHHHHHHHHHHPPPPPPPEEEEEEEEEQQQQQQQQQLLLLLLLLIIIIIIIISSSSSSGGGGKKKKKKKKKEEEEEEEEEDDDDDDDDAAAAAAAAAANNNNNNNNNNNNNNNNYYYYYYYYYYYYAAAAARRRRRRRRRRRGGGGRRRRRRRRRRRYYYYYYYYYYYYSSSSSSIIIIIIIIGGGGKKKKKKKKKEEEEEEEEEVVVVVVVIIIIIIIIDDDDDDDDRRRRRRRRRRRVVVVVVVTTTTTTTSSSSSSRRRRRRRRRRRLLLLLLLLQQQQQQQQQKKKKKKKKKIIIIIIIIAAAAAEEEEEEEEEQQQQQQQQQCCCCCCDDDDDDDDSSSSSSLLLLLLLLQQQQQQQQQGGGGFFFFFFFFFFFLLLLLLLLIIIIIIIIFFFFFFFFFFFHHHHHHHHHHSSSSSSLLLLLLLLGGGGGGGGGGGGTTTTTTTGGGGSSSSSSGGGGFFFFFFFFFFFTTTTTTTSSSSSSLLLLLLLLLLLLLLLLVVVVVVVEEEEEEEEERRRRRRRRRRRLLLLLLLLSSSSSSTTTTTTTDDDDDDDDYYYYYYYYYYYYSSSSSSKKKKKKKKKKKKKKKKKKCCCCCCKKKKKKKKKLLLLLLLLDDDDDDDDFFFFFFFFFFFAAAAAVVVVVVVYYYYYYYYYYYYPPPPPPPSSSSSSPPPPPPPKKKKKKKKKVVVVVVVSSSSSSTTTTTTTAAAAAVVVVVVVVVVVVVVEEEEEEEEEPPPPPPPYYYYYYYYYYYYNNNNNNNNAAAAALLLLLLLLLLLLLLLLTTTTTTTTTTTTTTHHHHHHHHHHSSSSSSTTTTTTTMMMMMMMMDDDDDDDDHHHHHHHHHHSSSSSSDDDDDDDDCCCCCCVVVVVVVFFFFFFFFFFFMMMMMMMMVVVVVVVDDDDDDDDNNNNNNNNEEEEEEEEEAAAAAIIIIIIIIYYYYYYYYYYYYDDDDDDDDIIIIIIIICCCCCCNNNNNNNNNNNNNNNNSSSSSSLLLLLLLLGGGGVVVVVVVDDDDDDDDRRRRRRRRRRRPPPPPPPAAAAAYYYYYYYYYYYYRRRRRRRRRRRNNNNNNNNLLLLLLLLNNNNNNNNRRRRRRRRRRRLLLLLLLLIIIIIIIIAAAAAQQQQQQQQQIIIIIIIIVVVVVVVSSSSSSSSSSSSTTTTTTTTTTTTTTAAAAASSSSSSLLLLLLLLRRRRRRRRRRRFFFFFFFFFFFSSSSSSGGGGSSSSSSMMMMMMMMNNNNNNNNVVVVVVVDDDDDDDDLLLLLLLLNNNNNNNNEEEEEEEEEFFFFFFFFFFFQQQQQQQQQTTTTTTTNNNNNNNNLLLLLLLLVVVVVVVPPPPPPPFFFFFFFFFFFPPPPPPPRRRRRRRRRRRIIIIIIIIHHHHHHHHHHFFFFFFFFFFFPPPPPPPLLLLLLLLVVVVVVVAAAAAYYYYYYYYYYYYAAAAAPPPPPPPLLLLLLLLMMMMMMMMSSSSSSAAAAAEEEEEEEEERRRRRRRRRRRSSSSSSAAAAAHHHHHHHHHHEEEEEEEEEQQQQQQQQQHHHHHHHHHHAAAAAIIIIIIIITTTTTTTTTTTTTTLLLLLLLLTTTTTTTNNNNNNNNAAAAACCCCCCFFFFFFFFFFFEEEEEEEEESSSSSSSSSSSSNNNNNNNNMMMMMMMMMMMMMMMMVVVVVVVKKKKKKKKKCCCCCCDDDDDDDDPPPPPPPRRRRRRRRRRRAAAAAGGGGKKKKKKKKKFFFFFFFFFFFMMMMMMMMAAAAACCCCCCCCCCCCMMMMMMMMLLLLLLLLYYYYYYYYYYYYRRRRRRRRRRRGGGGDDDDDDDDVVVVVVVVVVVVVVPPPPPPPKKKKKKKKKDDDDDDDDVVVVVVVNNNNNNNNAAAAAAAAAAVVVVVVVSSSSSSAAAAAIIIIIIIIKKKKKKKKKSSSSSSKKKKKKKKKRRRRRRRRRRRHHHHHHHHHHIIIIIIIIQQQQQQQQQFFFFFFFFFFFVVVVVVVDDDDDDDDWWWWWWWWWWWWWWCCCCCCPPPPPPPTTTTTTTGGGGFFFFFFFFFFFKKKKKKKKKIIIIIIIIGGGGIIIIIIIINNNNNNNNYYYYYYYYYYYYEEEEEEEEEKKKKKKKKKPPPPPPPAAAAAFFFFFFFFFFFVVVVVVVPPPPPPPDDDDDDDDGGGGDDDDDDDDLLLLLLLLAAAAAKKKKKKKKKTTTTTTTSSSSSSRRRRRRRRRRRAAAAACCCCCCCCCCCCMMMMMMMMLLLLLLLLSSSSSSNNNNNNNNTTTTTTTTTTTTTTAAAAAIIIIIIIISSSSSSVVVVVVVAAAAAFFFFFFFFFFFSSSSSSNNNNNNNNLLLLLLLLSSSSSSYYYYYYYYYYYYKKKKKKKKKFFFFFFFFFFFDDDDDDDDLLLLLLLLMMMMMMMMFFFFFFFFFFFKKKKKKKKKKKKKKKKKKRRRRRRRRRRRAAAAAFFFFFFFFFFFVVVVVVVHHHHHHHHHHWWWWWWWWWWWWWWYYYYYYYYYYYYVVVVVVVGGGGEEEEEEEEEGGGGMMMMMMMMEEEEEEEEEEEEEEEEEEGGGGEEEEEEEEEFFFFFFFFFFFTTTTTTTEEEEEEEEEAAAAARRRRRRRRRRREEEEEEEEENNNNNNNNIIIIIIIIAAAAAVVVVVVVLLLLLLLLEEEEEEEEERRRRRRRRRRRDDDDDDDDFFFFFFFFFFFEEEEEEEEEEEEEEEEEEVVVVVVVGGGGLLLLLLLLDDDDDDDDNNNNNNNNAAAAAEEEEEEEEEEEEEEEEEEGGGGGGGGDDDDDDDDEEEEEEEEEDDDDDDDDFFFFFFFFFFFDDDDDDDDEEEEEEEEEFFFFFFFFFFFF

SEQ ID NO: 53 - protein, 3507 aa, Homo sapiens
MMMMMMMMRRRRRRRRRRREEEEEEEEECCCCCCIIIIIIIISSSSSSVVVVVVVHHHHHHHHHHVVVVVVVGGGGQQQQQQQQQAAAAAGGGGVVVVVVVQQQQQQQQQMMMMMMMMGGGGNNNNNNNNAAAAACCCCCCWWWWWWWWWWWWWWEEEEEEEEELLLLLLLLYYYYYYYYYYYYCCCCCCLLLLLLLLEEEEEEEEEHHHHHHHHHHGGGGIIIIIIIIQQQQQQQQQPPPPPPPDDDDDDDDGGGGQQQQQQQQQMMMMMMMMPPPPPPPSSSSSSDDDDDDDDKKKKKKKKKTTTTTTTIIIIIIIIGGGGGGGGGGGGDDDDDDDDDDDDDDDDSSSSSSFFFFFFFFFFFTTTTTTTTTTTTTTFFFFFFFFFFFFFFFFFFFFFFCCCCCCEEEEEEEEETTTTTTTGGGGAAAAAGGGGKKKKKKKKKHHHHHHHHHHVVVVVVVPPPPPPPRRRRRRRRRRRAAAAAVVVVVVVFFFFFFFFFFFVVVVVVVDDDDDDDDLLLLLLLLEEEEEEEEEPPPPPPPTTTTTTTVVVVVVVIIIIIIIIDDDDDDDDEEEEEEEEEIIIIIIIIRRRRRRRRRRRNNNNNNNNGGGGPPPPPPPYYYYYYYYYYYYRRRRRRRRRRRQQQQQQQQQLLLLLLLLFFFFFFFFFFFHHHHHHHHHHPPPPPPPEEEEEEEEEQQQQQQQQQLLLLLLLLIIIIIIIITTTTTTTGGGGKKKKKKKKKEEEEEEEEEDDDDDDDDAAAAAAAAAANNNNNNNNNNNNNNNNYYYYYYYYYYYYAAAAARRRRRRRRRRRGGGGHHHHHHHHHHYYYYYYYYYYYYTTTTTTTIIIIIIIIGGGGKKKKKKKKKEEEEEEEEEIIIIIIIIIIIIIIIIDDDDDDDDPPPPPPPVVVVVVVLLLLLLLLDDDDDDDDRRRRRRRRRRRIIIIIIIIRRRRRRRRRRRKKKKKKKKKLLLLLLLLSSSSSSDDDDDDDDQQQQQQQQQCCCCCCTTTTTTTGGGGLLLLLLLLQQQQQQQQQGGGGFFFFFFFFFFFLLLLLLLLVVVVVVVFFFFFFFFFFFHHHHHHHHHHSSSSSSFFFFFFFFFFFGGGGGGGGGGGGTTTTTTTGGGGSSSSSSGGGGFFFFFFFFFFFTTTTTTTSSSSSSLLLLLLLLLLLLLLLLMMMMMMMMEEEEEEEEERRRRRRRRRRRLLLLLLLLSSSSSSVVVVVVVDDDDDDDDYYYYYYYYYYYYGGGGKKKKKKKKKKKKKKKKKKSSSSSSKKKKKKKKKLLLLLLLLEEEEEEEEEFFFFFFFFFFFSSSSSSIIIIIIIIYYYYYYYYYYYYPPPPPPPAAAAAPPPPPPPQQQQQQQQQVVVVVVVSSSSSSTTTTTTTAAAAAVVVVVVVVVVVVVVEEEEEEEEEPPPPPPPYYYYYYYYYYYYNNNNNNNNSSSSSSIIIIIIIILLLLLLLLTTTTTTTTTTTTTTHHHHHHHHHHTTTTTTTTTTTTTTLLLLLLLLEEEEEEEEEHHHHHHHHHHSSSSSSDDDDDDDDCCCCCCAAAAAFFFFFFFFFFFMMMMMMMMVVVVVVVDDDDDDDDNNNNNNNNEEEEEEEEEAAAAAIIIIIIIIYYYYYYYYYYYYDDDDDDDDIIIIIIIICCCCCCRRRRRRRRRRRRRRRRRRRRRRNNNNNNNNLLLLLLLLDDDDDDDDIIIIIIIIEEEEEEEEERRRRRRRRRRRPPPPPPPTTTTTTTYYYYYYYYYYYYTTTTTTTNNNNNNNNLLLLLLLLNNNNNNNNRRRRRRRRRRRLLLLLLLLIIIIIIIISSSSSSQQQQQQQQQIIIIIIIIVVVVVVVSSSSSSSSSSSSIIIIIIIITTTTTTTAAAAASSSSSSLLLLLLLLRRRRRRRRRRRFFFFFFFFFFFDDDDDDDDGGGGAAAAALLLLLLLLNNNNNNNNVVVVVVVDDDDDDDDLLLLLLLLTTTTTTTEEEEEEEEEFFFFFFFFFFFQQQQQQQQQTTTTTTTNNNNNNNNLLLLLLLLVVVVVVVPPPPPPPYYYYYYYYYYYYPPPPPPPRRRRRRRRRRRIIIIIIIIHHHHHHHHHHFFFFFFFFFFFPPPPPPPLLLLLLLLAAAAATTTTTTTYYYYYYYYYYYYAAAAAPPPPPPPVVVVVVVIIIIIIIISSSSSSAAAAAEEEEEEEEEKKKKKKKKKAAAAAYYYYYYYYYYYYHHHHHHHHHHEEEEEEEEEQQQQQQQQQLLLLLLLLSSSSSSVVVVVVVAAAAAEEEEEEEEEIIIIIIIITTTTTTTNNNNNNNNAAAAACCCCCCFFFFFFFFFFFEEEEEEEEEPPPPPPPAAAAANNNNNNNNQQQQQQQQQMMMMMMMMVVVVVVVKKKKKKKKKCCCCCCDDDDDDDDPPPPPPPRRRRRRRRRRRHHHHHHHHHHGGGGKKKKKKKKKYYYYYYYYYYYYMMMMMMMMAAAAACCCCCCCCCCCCLLLLLLLLLLLLLLLLYYYYYYYYYYYYRRRRRRRRRRRGGGGDDDDDDDDVVVVVVVVVVVVVVPPPPPPPKKKKKKKKKDDDDDDDDVVVVVVVNNNNNNNNAAAAAAAAAAIIIIIIIIAAAAAAAAAAIIIIIIIIKKKKKKKKKTTTTTTTKKKKKKKKKRRRRRRRRRRRSSSSSSIIIIIIIIQQQQQQQQQFFFFFFFFFFFVVVVVVVDDDDDDDDWWWWWWWWWWWWWWCCCCCCPPPPPPPTTTTTTTGGGGFFFFFFFFFFFKKKKKKKKKVVVVVVVGGGGIIIIIIIINNNNNNNNYYYYYYYYYYYYQQQQQQQQQPPPPPPPPPPPPPPTTTTTTTVVVVVVVVVVVVVVPPPPPPPGGGGGGGGDDDDDDDDLLLLLLLLAAAAAKKKKKKKKKVVVVVVVQQQQQQQQQRRRRRRRRRRRAAAAAVVVVVVVCCCCCCMMMMMMMMLLLLLLLLSSSSSSNNNNNNNNTTTTTTTTTTTTTTAAAAAIIIIIIIIAAAAAEEEEEEEEEAAAAAWWWWWWWWWWWWWWAAAAARRRRRRRRRRRLLLLLLLLDDDDDDDDHHHHHHHHHHKKKKKKKKKFFFFFFFFFFFDDDDDDDDLLLLLLLLMMMMMMMMYYYYYYYYYYYYAAAAAKKKKKKKKKRRRRRRRRRRRAAAAAFFFFFFFFFFFVVVVVVVHHHHHHHHHHWWWWWWWWWWWWWWYYYYYYYYYYYYVVVVVVVGGGGEEEEEEEEEGGGGMMMMMMMMEEEEEEEEEEEEEEEEEEGGGGEEEEEEEEEFFFFFFFFFFFSSSSSSEEEEEEEEEAAAAARRRRRRRRRRREEEEEEEEEDDDDDDDDMMMMMMMMAAAAAAAAAALLLLLLLLEEEEEEEEEKKKKKKKKKDDDDDDDDYYYYYYYYYYYYEEEEEEEEEEEEEEEEEEVVVVVVVGGGGIIIIIIIIDDDDDDDDSSSSSSYYYYYYYYYYYYEEEEEEEEEDDDDDDDDEEEEEEEEEDDDDDDDDEEEEEEEEEGGGGEEEEEEEEEEEEEEEEEEE

SEQ ID NO: 54 - protein, 455 aa, Zea mays
MMMMMMMMRRRRRRRRRRREEEEEEEEECCCCCCIIIIIIIISSSSSSIIIIIIIIHHHHHHHHHHIIIIIIIIGGGGQQQQQQQQQAAAAAGGGGIIIIIIIIQQQQQQQQQVVVVVVVGGGGNNNNNNNNAAAAACCCCCCWWWWWWWWWWWWWWEEEEEEEEELLLLLLLLYYYYYYYYYYYYCCCCCCLLLLLLLLEEEEEEEEEHHHHHHHHHHGGGGIIIIIIIIQQQQQQQQQAAAAADDDDDDDDGGGGQQQQQQQQQMMMMMMMMPPPPPPPGGGGDDDDDDDDKKKKKKKKKTTTTTTTIIIIIIIIGGGGGGGGGGGGDDDDDDDDAAAAAEEEEEEEEEFFFFFFFFFFFDDDDDDDDEEEEEEEEEGGGGEEEEEEEEEDDDDDDDDGGGGDDDDDDDDEEEEEEEEEGGGGDDDDDDDDEEEEEEEEEYYYYYYYYYYYYY

SEQ ID NO: 55 - protein, 3508 aa, Gallus gallus
MMMMMMMMRRRRRRRRRRREEEEEEEEECCCCCCIIIIIIIISSSSSSVVVVVVVHHHHHHHHHHVVVVVVVGGGGQQQQQQQQQAAAAAGGGGVVVVVVVQQQQQQQQQMMMMMMMMGGGGNNNNNNNNTTTTTTTCCCCCCWWWWWWWWWWWWWWEEEEEEEEELLLLLLLLYYYYYYYYYYYYCCCCCCLLLLLLLLEEEEEEEEEHHHHHHHHHHGGGGIIIIIIIIQQQQQQQQQPPPPPPPDDDDDDDDGGGGQQQQQQQQQMMMMMMMMPPPPPPPSSSSSSDDDDDDDDKKKKKKKKKTTTTTTTIIIIIIIIGGGGGGGGGGGGDDDDDDDDDDDDDDDDSSSSSSFFFFFFFFFFFTTTTTTTTTTTTTTFFFFFFFFFFFFFFFFFFFFFFCCCCCCEEEEEEEEETTTTTTTGGGGAAAAAGGGGKKKKKKKKKHHHHHHHHHHVVVVVVVPPPPPPPRRRRRRRRRRRAAAAAIIIIIIIIFFFFFFFFFFFVVVVVVVDDDDDDDDLLLLLLLLEEEEEEEEEPPPPPPPTTTTTTTVVVVVVVIIIIIIIIDDDDDDDDEEEEEEEEEVVVVVVVRRRRRRRRRRRAAAAAGGGGIIIIIIIIYYYYYYYYYYYYRRRRRRRRRRRQQQQQQQQQLLLLLLLLFFFFFFFFFFFHHHHHHHHHHPPPPPPPEEEEEEEEEQQQQQQQQQLLLLLLLLIIIIIIIITTTTTTTGGGGKKKKKKKKKEEEEEEEEEDDDDDDDDGGGGAAAAANNNNNNNNNNNNNNNNYYYYYYYYYYYYAAAAARRRRRRRRRRRGGGGHHHHHHHHHHYYYYYYYYYYYYTTTTTTTIIIIIIIIGGGGKKKKKKKKKEEEEEEEEEIIIIIIIIIIIIIIIIDDDDDDDDQQQQQQQQQVVVVVVVLLLLLLLLDDDDDDDDRRRRRRRRRRRIIIIIIIIRRRRRRRRRRRKKKKKKKKKLLLLLLLLAAAAADDDDDDDDQQQQQQQQQCCCCCCTTTTTTTGGGGLLLLLLLLQQQQQQQQQGGGGFFFFFFFFFFFLLLLLLLLCCCCCCFFFFFFFFFFFHHHHHHHHHHSSSSSSFFFFFFFFFFFGGGGGGGGGGGGTTTTTTTGGGGSSSSSSGGGGFFFFFFFFFFFTTTTTTTSSSSSSLLLLLLLLLLLLLLLLMMMMMMMMEEEEEEEEERRRRRRRRRRRLLLLLLLLSSSSSSGGGGDDDDDDDDYYYYYYYYYYYYGGGGKKKKKKKKKKKKKKKKKKSSSSSSKKKKKKKKKLLLLLLLLEEEEEEEEEFFFFFFFFFFFSSSSSSIIIIIIIIYYYYYYYYYYYYPPPPPPPAAAAAPPPPPPPQQQQQQQQQVVVVVVVSSSSSSTTTTTTTAAAAAVVVVVVVVVVVVVVEEEEEEEEEPPPPPPPYYYYYYYYYYYYNNNNNNNNSSSSSSIIIIIIIILLLLLLLLTTTTTTTTTTTTTTHHHHHHHHHHTTTTTTTTTTTTTTLLLLLLLLEEEEEEEEEHHHHHHHHHHSSSSSSDDDDDDDDCCCCCCAAAAAFFFFFFFFFFFMMMMMMMMVVVVVVVDDDDDDDDNNNNNNNNEEEEEEEEEAAAAAIIIIIIIIYYYYYYYYYYYYDDDDDDDDIIIIIIIICCCCCCRRRRRRRRRRRRRRRRRRRRRRNNNNNNNNLLLLLLLLDDDDDDDDIIIIIIIIEEEEEEEEERRRRRRRRRRRPPPPPPPTTTTTTTYYYYYYYYYYYYTTTTTTTNNNNNNNNLLLLLLLLNNNNNNNNRRRRRRRRRRRLLLLLLLLIIIIIIIISSSSSSQQQQQQQQQIIIIIIIIVVVVVVVSSSSSSSSSSSSIIIIIIIITTTTTTTAAAAASSSSSSLLLLLLLLRRRRRRRRRRRFFFFFFFFFFFDDDDDDDDGGGGAAAAALLLLLLLLNNNNNNNNVVVVVVVDDDDDDDDLLLLLLLLTTTTTTTEEEEEEEEEFFFFFFFFFFFQQQQQQQQQTTTTTTTNNNNNNNNLLLLLLLLVVVVVVVPPPPPPPYYYYYYYYYYYYPPPPPPPRRRRRRRRRRRIIIIIIIIHHHHHHHHHHFFFFFFFFFFFPPPPPPPLLLLLLLLAAAAATTTTTTTYYYYYYYYYYYYAAAAAPPPPPPPVVVVVVVIIIIIIIISSSSSSAAAAAEEEEEEEEEKKKKKKKKKAAAAAYYYYYYYYYYYYHHHHHHHHHHEEEEEEEEEQQQQQQQQQLLLLLLLLSSSSSSVVVVVVVAAAAAEEEEEEEEEIIIIIIIITTTTTTTNNNNNNNNSSSSSSCCCCCCFFFFFFFFFFFEEEEEEEEEPPPPPPPAAAAANNNNNNNNQQQQQQQQQMMMMMMMMVVVVVVVKKKKKKKKKCCCCCCDDDDDDDDPPPPPPPRRRRRRRRRRRHHHHHHHHHHGGGGKKKKKKKKKYYYYYYYYYYYYMMMMMMMMAAAAACCCCCCCCCCCCLLLLLLLLLLLLLLLLYYYYYYYYYYYYRRRRRRRRRRRGGGGDDDDDDDDVVVVVVVVVVVVVVPPPPPPPKKKKKKKKKDDDDDDDDVVVVVVVNNNNNNNNAAAAAAAAAAIIIIIIIIAAAAATTTTTTTIIIIIIIIKKKKKKKKKTTTTTTTKKKKKKKKKRRRRRRRRRRRSSSSSSIIIIIIIIQQQQQQQQQFFFFFFFFFFFVVVVVVVDDDDDDDDWWWWWWWWWWWWWWCCCCCCPPPPPPPTTTTTTTGGGGFFFFFFFFFFFKKKKKKKKKVVVVVVVGGGGIIIIIIIINNNNNNNNYYYYYYYYYYYYQQQQQQQQQPPPPPPPPPPPPPPTTTTTTTVVVVVVVVVVVVVVAAAAAGGGGGGGGDDDDDDDDLLLLLLLLAAAAAKKKKKKKKKVVVVVVVQQQQQQQQQRRRRRRRRRRRIIIIIIIIVVVVVVVCCCCCCMMMMMMMMLLLLLLLLSSSSSSNNNNNNNNTTTTTTTTTTTTTTAAAAAIIIIIIIIAAAAAEEEEEEEEEAAAAAWWWWWWWWWWWWWWAAAAARRRRRRRRRRRLLLLLLLLDDDDDDDDHHHHHHHHHHKKKKKKKKKFFFFFFFFFFFDDDDDDDDLLLLLLLLMMMMMMMMYYYYYYYYYYYYAAAAAKKKKKKKKKRRRRRRRRRRRAAAAAFFFFFFFFFFFVVVVVVVHHHHHHHHHHWWWWWWWWWWWWWWYYYYYYYYYYYYVVVVVVVGGGGEEEEEEEEEGGGGMMMMMMMMEEEEEEEEEEEEEEEEEEGGGGEEEEEEEEEFFFFFFFFFFFSSSSSSEEEEEEEEEAAAAARRRRRRRRRRREEEEEEEEEDDDDDDDDIIIIIIIIAAAAAAAAAALLLLLLLLEEEEEEEEEKKKKKKKKKDDDDDDDDYYYYYYYYYYYYEEEEEEEEEEEEEEEEEEVVVVVVVGGGGLLLLLLLLDDDDDDDDSSSSSSYYYYYYYYYYYYEEEEEEEEEDDDDDDDDEEEEEEEEEEEEEEEEEEEEEEEEEEEGGGGEEEEEEEEEEEEEEEEEEE

SEQ ID NO: 56 - protein, 3487 aa, Zea mays
MMMMMMMMRRRRRRRRRRREEEEEEEEEIIIIIIIIIIIIIIIISSSSSSIIIIIIIIHHHHHHHHHHIIIIIIIIGGGGQQQQQQQQQAAAAAGGGGIIIIIIIIQQQQQQQQQVVVVVVVGGGGNNNNNNNNAAAAACCCCCCWWWWWWWWWWWWWWEEEEEEEEELLLLLLLLYYYYYYYYYYYYCCCCCCLLLLLLLLEEEEEEEEEHHHHHHHHHHGGGGIIIIIIIIEEEEEEEEEHHHHHHHHHHDDDDDDDDGGGGTTTTTTTMMMMMMMMPPPPPPPSSSSSSDDDDDDDDSSSSSSSSSSSSVVVVVVVGGGGVVVVVVVAAAAAHHHHHHHHHHDDDDDDDDAAAAAFFFFFFFFFFFNNNNNNNNTTTTTTTFFFFFFFFFFFFFFFFFFFFFFSSSSSSEEEEEEEEETTTTTTTGGGGSSSSSSGGGGKKKKKKKKKHHHHHHHHHHVVVVVVVPPPPPPPRRRRRRRRRRRAAAAAIIIIIIIIFFFFFFFFFFFVVVVVVVDDDDDDDDLLLLLLLLEEEEEEEEEPPPPPPPTTTTTTTVVVVVVVIIIIIIIIDDDDDDDDEEEEEEEEEVVVVVVVRRRRRRRRRRRTTTTTTTGGGGSSSSSSYYYYYYYYYYYYRRRRRRRRRRRQQQQQQQQQLLLLLLLLFFFFFFFFFFFHHHHHHHHHHPPPPPPPEEEEEEEEEQQQQQQQQQLLLLLLLLIIIIIIIISSSSSSGGGGKKKKKKKKKEEEEEEEEEDDDDDDDDAAAAAAAAAANNNNNNNNNNNNNNNNFFFFFFFFFFFAAAAARRRRRRRRRRRGGGGHHHHHHHHHHYYYYYYYYYYYYTTTTTTTVVVVVVVGGGGKKKKKKKKKEEEEEEEEEIIIIIIIIVVVVVVVDDDDDDDDLLLLLLLLCCCCCCLLLLLLLLDDDDDDDDRRRRRRRRRRRVVVVVVVRRRRRRRRRRRKKKKKKKKKLLLLLLLLAAAAADDDDDDDDNNNNNNNNCCCCCCTTTTTTTGGGGLLLLLLLLQQQQQQQQQGGGGFFFFFFFFFFFLLLLLLLLVVVVVVVFFFFFFFFFFFNNNNNNNNAAAAAVVVVVVVGGGGGGGGGGGGTTTTTTTGGGGSSSSSSGGGGLLLLLLLLGGGGSSSSSSLLLLLLLLLLLLLLLLLLLLLLLLEEEEEEEEERRRRRRRRRRRLLLLLLLLSSSSSSVVVVVVVDDDDDDDDYYYYYYYYYYYYGGGGKKKKKKKKKKKKKKKKKKSSSSSSKKKKKKKKKLLLLLLLLGGGGFFFFFFFFFFFTTTTTTTIIIIIIIIYYYYYYYYYYYYPPPPPPPSSSSSSPPPPPPPQQQQQQQQQVVVVVVVSSSSSSTTTTTTTAAAAAVVVVVVVVVVVVVVEEEEEEEEEPPPPPPPYYYYYYYYYYYYNNNNNNNNSSSSSSVVVVVVVLLLLLLLLSSSSSSTTTTTTTHHHHHHHHHHSSSSSSLLLLLLLLLLLLLLLLEEEEEEEEEHHHHHHHHHHTTTTTTTDDDDDDDDVVVVVVVAAAAAVVVVVVVLLLLLLLLLLLLLLLLDDDDDDDDNNNNNNNNEEEEEEEEEAAAAAIIIIIIIIYYYYYYYYYYYYDDDDDDDDIIIIIIIICCCCCCRRRRRRRRRRRRRRRRRRRRRRSSSSSSLLLLLLLLDDDDDDDDIIIIIIIIEEEEEEEEERRRRRRRRRRRPPPPPPPTTTTTTTYYYYYYYYYYYYTTTTTTTNNNNNNNNLLLLLLLLNNNNNNNNRRRRRRRRRRRLLLLLLLLIIIIIIIISSSSSSQQQQQQQQQIIIIIIIIIIIIIIIISSSSSSSSSSSSLLLLLLLLTTTTTTTTTTTTTTSSSSSSLLLLLLLLRRRRRRRRRRRFFFFFFFFFFFDDDDDDDDGGGGAAAAAIIIIIIIINNNNNNNNVVVVVVVDDDDDDDDVVVVVVVTTTTTTTEEEEEEEEEFFFFFFFFFFFQQQQQQQQQTTTTTTTNNNNNNNNLLLLLLLLVVVVVVVPPPPPPPYYYYYYYYYYYYPPPPPPPRRRRRRRRRRRIIIIIIIIHHHHHHHHHHFFFFFFFFFFFMMMMMMMMLLLLLLLLSSSSSSSSSSSSYYYYYYYYYYYYAAAAAPPPPPPPVVVVVVVIIIIIIIISSSSSSAAAAAEEEEEEEEEKKKKKKKKKAAAAAYYYYYYYYYYYYHHHHHHHHHHEEEEEEEEEQQQQQQQQQLLLLLLLLSSSSSSVVVVVVVPPPPPPPEEEEEEEEEIIIIIIIITTTTTTTNNNNNNNNAAAAAVVVVVVVFFFFFFFFFFFEEEEEEEEEPPPPPPPSSSSSSSSSSSSMMMMMMMMMMMMMMMMAAAAAKKKKKKKKKCCCCCCDDDDDDDDPPPPPPPRRRRRRRRRRRHHHHHHHHHHGGGGKKKKKKKKKYYYYYYYYYYYYMMMMMMMMAAAAACCCCCCCCCCCCLLLLLLLLMMMMMMMMYYYYYYYYYYYYRRRRRRRRRRRGGGGDDDDDDDDVVVVVVVVVVVVVVPPPPPPPKKKKKKKKKDDDDDDDDVVVVVVVNNNNNNNNAAAAAAAAAAVVVVVVVAAAAATTTTTTTIIIIIIIIKKKKKKKKKTTTTTTTKKKKKKKKKRRRRRRRRRRRTTTTTTTVVVVVVVQQQQQQQQQFFFFFFFFFFFVVVVVVVDDDDDDDDWWWWWWWWWWWWWWCCCCCCPPPPPPPTTTTTTTGGGGFFFFFFFFFFFKKKKKKKKKCCCCCCGGGGIIIIIIIINNNNNNNNYYYYYYYYYYYYQQQQQQQQQPPPPPPPPPPPPPPSSSSSSVVVVVVVVVVVVVVPPPPPPPGGGGGGGGDDDDDDDDLLLLLLLLAAAAAKKKKKKKKKVVVVVVVQQQQQQQQQRRRRRRRRRRRAAAAAVVVVVVVCCCCCCMMMMMMMMIIIIIIIISSSSSSNNNNNNNNNNNNNNNNTTTTTTTAAAAAVVVVVVVAAAAAEEEEEEEEEVVVVVVVFFFFFFFFFFFSSSSSSRRRRRRRRRRRIIIIIIIIDDDDDDDDHHHHHHHHHHKKKKKKKKKFFFFFFFFFFFDDDDDDDDLLLLLLLLMMMMMMMMYYYYYYYYYYYYAAAAAKKKKKKKKKRRRRRRRRRRRAAAAAFFFFFFFFFFFVVVVVVVHHHHHHHHHHWWWWWWWWWWWWWWYYYYYYYYYYYYVVVVVVVGGGGEEEEEEEEEGGGGMMMMMMMMEEEEEEEEEEEEEEEEEEGGGGEEEEEEEEEFFFFFFFFFFFSSSSSSEEEEEEEEEAAAAARRRRRRRRRRREEEEEEEEEDDDDDDDDLLLLLLLLAAAAAAAAAALLLLLLLLEEEEEEEEEKKKKKKKKKDDDDDDDDYYYYYYYYYYYYEEEEEEEEEEEEEEEEEEVVVVVVVGGGGAAAAAEEEEEEEEEGGGGAAAAADDDDDDDDDDDDDDDDEEEEEEEEEGGGGDDDDDDDDEEEEEEEEEGGGGDDDDDDDDDDDDDDDDYYYYYYYYYYYYY

SEQ ID NO: 57 - protein, 3479 aa, Arabidopsis thaliana
MMMMMMMMRRRRRRRRRRREEEEEEEEECCCCCCIIIIIIIISSSSSSIIIIIIIIHHHHHHHHHHIIIIIIIIGGGGQQQQQQQQQAAAAAGGGGIIIIIIIIQQQQQQQQQVVVVVVVGGGGNNNNNNNNAAAAACCCCCCWWWWWWWWWWWWWWEEEEEEEEELLLLLLLLYYYYYYYYYYYYCCCCCCLLLLLLLLEEEEEEEEEHHHHHHHHHHGGGGIIIIIIIIQQQQQQQQQPPPPPPPDDDDDDDDGGGGQQQQQQQQQMMMMMMMMPPPPPPPGGGGDDDDDDDDKKKKKKKKKTTTTTTTVVVVVVVGGGGGGGGGGGGDDDDDDDDDDDDDDDDAAAAAFFFFFFFFFFFNNNNNNNNTTTTTTTFFFFFFFFFFFFFFFFFFFFFFSSSSSSEEEEEEEEETTTTTTTGGGGAAAAAGGGGKKKKKKKKKHHHHHHHHHHVVVVVVVPPPPPPPRRRRRRRRRRRAAAAAVVVVVVVFFFFFFFFFFFVVVVVVVDDDDDDDDLLLLLLLLEEEEEEEEEPPPPPPPTTTTTTTVVVVVVVIIIIIIIIDDDDDDDDEEEEEEEEEVVVVVVVRRRRRRRRRRRTTTTTTTGGGGTTTTTTTYYYYYYYYYYYYRRRRRRRRRRRQQQQQQQQQLLLLLLLLFFFFFFFFFFFHHHHHHHHHHPPPPPPPEEEEEEEEEQQQQQQQQQLLLLLLLLIIIIIIIISSSSSSGGGGKKKKKKKKKEEEEEEEEEDDDDDDDDAAAAAAAAAANNNNNNNNNNNNNNNNFFFFFFFFFFFAAAAARRRRRRRRRRRGGGGHHHHHHHHHHYYYYYYYYYYYYTTTTTTTIIIIIIIIGGGGKKKKKKKKKEEEEEEEEEIIIIIIIIVVVVVVVDDDDDDDDLLLLLLLLCCCCCCLLLLLLLLDDDDDDDDRRRRRRRRRRRIIIIIIIIRRRRRRRRRRRKKKKKKKKKLLLLLLLLAAAAADDDDDDDDNNNNNNNNCCCCCCTTTTTTTGGGGLLLLLLLLQQQQQQQQQGGGGFFFFFFFFFFFLLLLLLLLVVVVVVVFFFFFFFFFFFNNNNNNNNAAAAAVVVVVVVGGGGGGGGGGGGTTTTTTTGGGGSSSSSSGGGGLLLLLLLLGGGGSSSSSSLLLLLLLLLLLLLLLLLLLLLLLLEEEEEEEEERRRRRRRRRRRLLLLLLLLSSSSSSVVVVVVVDDDDDDDDYYYYYYYYYYYYGGGGKKKKKKKKKKKKKKKKKKSSSSSSKKKKKKKKKLLLLLLLLGGGGFFFFFFFFFFFTTTTTTTVVVVVVVYYYYYYYYYYYYPPPPPPPSSSSSSPPPPPPPQQQQQQQQQVVVVVVVSSSSSSTTTTTTTSSSSSSVVVVVVVVVVVVVVEEEEEEEEEPPPPPPPYYYYYYYYYYYYNNNNNNNNSSSSSSVVVVVVVLLLLLLLLSSSSSSTTTTTTTHHHHHHHHHHSSSSSSLLLLLLLLLLLLLLLLEEEEEEEEEHHHHHHHHHHTTTTTTTDDDDDDDDVVVVVVVSSSSSSIIIIIIIILLLLLLLLLLLLLLLLDDDDDDDDNNNNNNNNEEEEEEEEEAAAAAIIIIIIIIYYYYYYYYYYYYDDDDDDDDIIIIIIIICCCCCCRRRRRRRRRRRRRRRRRRRRRRSSSSSSLLLLLLLLNNNNNNNNIIIIIIIIEEEEEEEEERRRRRRRRRRRPPPPPPPTTTTTTTYYYYYYYYYYYYTTTTTTTNNNNNNNNLLLLLLLLNNNNNNNNRRRRRRRRRRRLLLLLLLLVVVVVVVSSSSSSQQQQQQQQQVVVVVVVIIIIIIIISSSSSSSSSSSSLLLLLLLLTTTTTTTAAAAASSSSSSLLLLLLLLRRRRRRRRRRRFFFFFFFFFFFDDDDDDDDGGGGAAAAALLLLLLLLNNNNNNNNVVVVVVVDDDDDDDDVVVVVVVTTTTTTTEEEEEEEEEFFFFFFFFFFFQQQQQQQQQTTTTTTTNNNNNNNNLLLLLLLLVVVVVVVPPPPPPPYYYYYYYYYYYYPPPPPPPRRRRRRRRRRRIIIIIIIIHHHHHHHHHHFFFFFFFFFFFMMMMMMMMLLLLLLLLSSSSSSSSSSSSYYYYYYYYYYYYAAAAAPPPPPPPVVVVVVVIIIIIIIISSSSSSAAAAAEEEEEEEEEKKKKKKKKKAAAAAFFFFFFFFFFFHHHHHHHHHHEEEEEEEEEQQQQQQQQQLLLLLLLLSSSSSSVVVVVVVAAAAAEEEEEEEEEIIIIIIIITTTTTTTNNNNNNNNSSSSSSAAAAAFFFFFFFFFFFEEEEEEEEEPPPPPPPAAAAASSSSSSMMMMMMMMMMMMMMMMAAAAAKKKKKKKKKCCCCCCDDDDDDDDPPPPPPPRRRRRRRRRRRHHHHHHHHHHGGGGKKKKKKKKKYYYYYYYYYYYYMMMMMMMMAAAAACCCCCCCCCCCCLLLLLLLLMMMMMMMMYYYYYYYYYYYYRRRRRRRRRRRGGGGDDDDDDDDVVVVVVVVVVVVVVPPPPPPPKKKKKKKKKDDDDDDDDVVVVVVVNNNNNNNNAAAAAAAAAAVVVVVVVGGGGTTTTTTTIIIIIIIIKKKKKKKKKTTTTTTTKKKKKKKKKRRRRRRRRRRRTTTTTTTIIIIIIIIQQQQQQQQQFFFFFFFFFFFVVVVVVVDDDDDDDDWWWWWWWWWWWWWWCCCCCCPPPPPPPTTTTTTTGGGGFFFFFFFFFFFKKKKKKKKKCCCCCCGGGGIIIIIIIINNNNNNNNYYYYYYYYYYYYQQQQQQQQQPPPPPPPPPPPPPPTTTTTTTVVVVVVVVVVVVVVPPPPPPPGGGGGGGGDDDDDDDDLLLLLLLLAAAAAKKKKKKKKKVVVVVVVQQQQQQQQQRRRRRRRRRRRAAAAAVVVVVVVCCCCCCMMMMMMMMIIIIIIIISSSSSSNNNNNNNNSSSSSSTTTTTTTSSSSSSVVVVVVVAAAAAEEEEEEEEEVVVVVVVFFFFFFFFFFFSSSSSSRRRRRRRRRRRIIIIIIIIDDDDDDDDHHHHHHHHHHKKKKKKKKKFFFFFFFFFFFDDDDDDDDLLLLLLLLMMMMMMMMYYYYYYYYYYYYAAAAAKKKKKKKKKRRRRRRRRRRRAAAAAFFFFFFFFFFFVVVVVVVHHHHHHHHHHWWWWWWWWWWWWWWYYYYYYYYYYYYVVVVVVVGGGGEEEEEEEEEGGGGMMMMMMMMEEEEEEEEEEEEEEEEEEGGGGEEEEEEEEEFFFFFFFFFFFSSSSSSEEEEEEEEEAAAAARRRRRRRRRRREEEEEEEEEDDDDDDDDLLLLLLLLAAAAAAAAAALLLLLLLLEEEEEEEEEKKKKKKKKKDDDDDDDDYYYYYYYYYYYYEEEEEEEEEEEEEEEEEEVVVVVVVGGGGAAAAAEEEEEEEEEGGGGGGGGDDDDDDDDDDDDDDDDEEEEEEEEEDDDDDDDDDDDDDDDDEEEEEEEEEGGGGEEEEEEEEEEEEEEEEEEYYYYYYYYYYYYY

SEQ ID NO: 58 - protein, 3507 aa, Homo sapiens
MMMMMMMMRRRRRRRRRRREEEEEEEEECCCCCCIIIIIIIISSSSSSIIIIIIIIHHHHHHHHHHVVVVVVVGGGGQQQQQQQQQAAAAAGGGGVVVVVVVQQQQQQQQQIIIIIIIIGGGGNNNNNNNNAAAAACCCCCCWWWWWWWWWWWWWWEEEEEEEEELLLLLLLLYYYYYYYYYYYYCCCCCCLLLLLLLLEEEEEEEEEHHHHHHHHHHGGGGIIIIIIIIQQQQQQQQQPPPPPPPDDDDDDDDGGGGQQQQQQQQQMMMMMMMMPPPPPPPSSSSSSDDDDDDDDKKKKKKKKKTTTTTTTIIIIIIIIGGGGGGGGGGGGDDDDDDDDDDDDDDDDSSSSSSFFFFFFFFFFFNNNNNNNNTTTTTTTFFFFFFFFFFFFFFFFFFFFFFSSSSSSEEEEEEEEETTTTTTTGGGGAAAAAGGGGKKKKKKKKKHHHHHHHHHHVVVVVVVPPPPPPPRRRRRRRRRRRAAAAAVVVVVVVFFFFFFFFFFFVVVVVVVDDDDDDDDLLLLLLLLEEEEEEEEEPPPPPPPTTTTTTTVVVVVVVIIIIIIIIDDDDDDDDEEEEEEEEEVVVVVVVRRRRRRRRRRRTTTTTTTGGGGTTTTTTTYYYYYYYYYYYYRRRRRRRRRRRQQQQQQQQQLLLLLLLLFFFFFFFFFFFHHHHHHHHHHPPPPPPPEEEEEEEEEQQQQQQQQQLLLLLLLLIIIIIIIITTTTTTTGGGGKKKKKKKKKEEEEEEEEEDDDDDDDDAAAAAAAAAANNNNNNNNNNNNNNNNYYYYYYYYYYYYAAAAARRRRRRRRRRRGGGGHHHHHHHHHHYYYYYYYYYYYYTTTTTTTIIIIIIIIGGGGKKKKKKKKKEEEEEEEEEIIIIIIIIIIIIIIIIDDDDDDDDLLLLLLLLVVVVVVVLLLLLLLLDDDDDDDDRRRRRRRRRRRIIIIIIIIRRRRRRRRRRRKKKKKKKKKLLLLLLLLAAAAADDDDDDDDQQQQQQQQQCCCCCCTTTTTTTGGGGLLLLLLLLQQQQQQQQQGGGGFFFFFFFFFFFLLLLLLLLVVVVVVVFFFFFFFFFFFHHHHHHHHHHSSSSSSFFFFFFFFFFFGGGGGGGGGGGGTTTTTTTGGGGSSSSSSGGGGFFFFFFFFFFFTTTTTTTSSSSSSLLLLLLLLLLLLLLLLMMMMMMMMEEEEEEEEERRRRRRRRRRRLLLLLLLLSSSSSSVVVVVVVDDDDDDDDYYYYYYYYYYYYGGGGKKKKKKKKKKKKKKKKKKSSSSSSKKKKKKKKKLLLLLLLLEEEEEEEEEFFFFFFFFFFFSSSSSSIIIIIIIIYYYYYYYYYYYYPPPPPPPAAAAAPPPPPPPQQQQQQQQQVVVVVVVSSSSSSTTTTTTTAAAAAVVVVVVVVVVVVVVEEEEEEEEEPPPPPPPYYYYYYYYYYYYNNNNNNNNSSSSSSIIIIIIIILLLLLLLLTTTTTTTTTTTTTTHHHHHHHHHHTTTTTTTTTTTTTTLLLLLLLLEEEEEEEEEHHHHHHHHHHSSSSSSDDDDDDDDCCCCCCAAAAAFFFFFFFFFFFMMMMMMMMVVVVVVVDDDDDDDDNNNNNNNNEEEEEEEEEAAAAAIIIIIIIIYYYYYYYYYYYYDDDDDDDDIIIIIIIICCCCCCRRRRRRRRRRRRRRRRRRRRRRNNNNNNNNLLLLLLLLDDDDDDDDIIIIIIIIEEEEEEEEERRRRRRRRRRRPPPPPPPTTTTTTTYYYYYYYYYYYYTTTTTTTNNNNNNNNLLLLLLLLNNNNNNNNRRRRRRRRRRRLLLLLLLLIIIIIIIISSSSSSQQQQQQQQQIIIIIIIIVVVVVVVSSSSSSSSSSSSIIIIIIIITTTTTTTAAAAASSSSSSLLLLLLLLRRRRRRRRRRRFFFFFFFFFFFDDDDDDDDGGGGAAAAALLLLLLLLNNNNNNNNVVVVVVVDDDDDDDDLLLLLLLLTTTTTTTEEEEEEEEEFFFFFFFFFFFQQQQQQQQQTTTTTTTNNNNNNNNLLLLLLLLVVVVVVVPPPPPPPYYYYYYYYYYYYPPPPPPPRRRRRRRRRRRIIIIIIIIHHHHHHHHHHFFFFFFFFFFFPPPPPPPLLLLLLLLAAAAATTTTTTTYYYYYYYYYYYYAAAAAPPPPPPPVVVVVVVIIIIIIIISSSSSSAAAAAEEEEEEEEEKKKKKKKKKAAAAAYYYYYYYYYYYYHHHHHHHHHHEEEEEEEEEQQQQQQQQQLLLLLLLLTTTTTTTVVVVVVVAAAAAEEEEEEEEEIIIIIIIITTTTTTTNNNNNNNNAAAAACCCCCCFFFFFFFFFFFEEEEEEEEEPPPPPPPAAAAANNNNNNNNQQQQQQQQQMMMMMMMMVVVVVVVKKKKKKKKKCCCCCCDDDDDDDDPPPPPPPRRRRRRRRRRRHHHHHHHHHHGGGGKKKKKKKKKYYYYYYYYYYYYMMMMMMMMAAAAACCCCCCCCCCCCLLLLLLLLLLLLLLLLYYYYYYYYYYYYRRRRRRRRRRRGGGGDDDDDDDDVVVVVVVVVVVVVVPPPPPPPKKKKKKKKKDDDDDDDDVVVVVVVNNNNNNNNAAAAAAAAAAIIIIIIIIAAAAATTTTTTTIIIIIIIIKKKKKKKKKTTTTTTTKKKKKKKKKRRRRRRRRRRRTTTTTTTIIIIIIIIQQQQQQQQQFFFFFFFFFFFVVVVVVVDDDDDDDDWWWWWWWWWWWWWWCCCCCCPPPPPPPTTTTTTTGGGGFFFFFFFFFFFKKKKKKKKKVVVVVVVGGGGIIIIIIIINNNNNNNNYYYYYYYYYYYYQQQQQQQQQPPPPPPPPPPPPPPTTTTTTTVVVVVVVVVVVVVVPPPPPPPGGGGGGGGDDDDDDDDLLLLLLLLAAAAAKKKKKKKKKVVVVVVVQQQQQQQQQRRRRRRRRRRRAAAAAVVVVVVVCCCCCCMMMMMMMMLLLLLLLLSSSSSSNNNNNNNNTTTTTTTTTTTTTTAAAAAVVVVVVVAAAAAEEEEEEEEEAAAAAWWWWWWWWWWWWWWAAAAARRRRRRRRRRRLLLLLLLLDDDDDDDDHHHHHHHHHHKKKKKKKKKFFFFFFFFFFFDDDDDDDDLLLLLLLLMMMMMMMMYYYYYYYYYYYYAAAAAKKKKKKKKKRRRRRRRRRRRAAAAAFFFFFFFFFFFVVVVVVVHHHHHHHHHHWWWWWWWWWWWWWWYYYYYYYYYYYYVVVVVVVGGGGEEEEEEEEEGGGGMMMMMMMMEEEEEEEEEEEEEEEEEEGGGGEEEEEEEEEFFFFFFFFFFFSSSSSSEEEEEEEEEAAAAARRRRRRRRRRREEEEEEEEEDDDDDDDDMMMMMMMMAAAAAAAAAALLLLLLLLEEEEEEEEEKKKKKKKKKDDDDDDDDYYYYYYYYYYYYEEEEEEEEEEEEEEEEEEVVVVVVVGGGGAAAAADDDDDDDDSSSSSSAAAAADDDDDDDDGGGGEEEEEEEEEDDDDDDDDEEEEEEEEEGGGGEEEEEEEEEEEEEEEEEEYYYYYYYYYYYYY

SEQ ID NO: 59 - protein, 3485 aa, Zea mays
MMMMMMMMRRRRRRRRRRREEEEEEEEEIIIIIIIIIIIIIIIISSSSSSIIIIIIIIHHHHHHHHHHIIIIIIIIGGGGQQQQQQQQQAAAAAGGGGIIIIIIIIQQQQQQQQQVVVVVVVGGGGNNNNNNNNAAAAACCCCCCWWWWWWWWWWWWWWEEEEEEEEELLLLLLLLYYYYYYYYYYYYCCCCCCLLLLLLLLEEEEEEEEEHHHHHHHHHHGGGGIIIIIIIIEEEEEEEEEPPPPPPPDDDDDDDDGGGGTTTTTTTMMMMMMMMPPPPPPPSSSSSSDDDDDDDDTTTTTTTSSSSSSVVVVVVVGGGGVVVVVVVAAAAAHHHHHHHHHHDDDDDDDDAAAAAFFFFFFFFFFFNNNNNNNNTTTTTTTFFFFFFFFFFFFFFFFFFFFFFSSSSSSEEEEEEEEETTTTTTTGGGGSSSSSSGGGGKKKKKKKKKHHHHHHHHHHVVVVVVVPPPPPPPRRRRRRRRRRRAAAAAIIIIIIIIFFFFFFFFFFFVVVVVVVDDDDDDDDLLLLLLLLEEEEEEEEEPPPPPPPTTTTTTTVVVVVVVIIIIIIIIDDDDDDDDEEEEEEEEEVVVVVVVRRRRRRRRRRRTTTTTTTGGGGSSSSSSYYYYYYYYYYYYRRRRRRRRRRRQQQQQQQQQLLLLLLLLFFFFFFFFFFFHHHHHHHHHHPPPPPPPEEEEEEEEEQQQQQQQQQLLLLLLLLIIIIIIIISSSSSSGGGGKKKKKKKKKEEEEEEEEEDDDDDDDDAAAAAAAAAANNNNNNNNNNNNNNNNFFFFFFFFFFFAAAAARRRRRRRRRRRGGGGHHHHHHHHHHYYYYYYYYYYYYTTTTTTTVVVVVVVGGGGKKKKKKKKKEEEEEEEEEIIIIIIIIVVVVVVVDDDDDDDDLLLLLLLLCCCCCCLLLLLLLLDDDDDDDDRRRRRRRRRRRVVVVVVVRRRRRRRRRRRKKKKKKKKKLLLLLLLLAAAAADDDDDDDDNNNNNNNNCCCCCCTTTTTTTGGGGLLLLLLLLQQQQQQQQQGGGGFFFFFFFFFFFLLLLLLLLVVVVVVVFFFFFFFFFFFNNNNNNNNAAAAAVVVVVVVGGGGGGGGGGGGTTTTTTTGGGGSSSSSSGGGGLLLLLLLLGGGGSSSSSSLLLLLLLLLLLLLLLLLLLLLLLLEEEEEEEEERRRRRRRRRRRLLLLLLLLSSSSSSVVVVVVVDDDDDDDDYYYYYYYYYYYYGGGGKKKKKKKKKKKKKKKKKKSSSSSSKKKKKKKKKLLLLLLLLGGGGFFFFFFFFFFFTTTTTTTIIIIIIIIYYYYYYYYYYYYPPPPPPPSSSSSSPPPPPPPQQQQQQQQQVVVVVVVSSSSSSTTTTTTTAAAAAVVVVVVVVVVVVVVEEEEEEEEEPPPPPPPYYYYYYYYYYYYNNNNNNNNSSSSSSVVVVVVVLLLLLLLLSSSSSSTTTTTTTHHHHHHHHHHSSSSSSLLLLLLLLLLLLLLLLEEEEEEEEEHHHHHHHHHHTTTTTTTDDDDDDDDVVVVVVVAAAAAVVVVVVVLLLLLLLLLLLLLLLLDDDDDDDDNNNNNNNNEEEEEEEEEAAAAAIIIIIIIIYYYYYYYYYYYYDDDDDDDDIIIIIIIICCCCCCRRRRRRRRRRRRRRRRRRRRRRSSSSSSLLLLLLLLDDDDDDDDIIIIIIIIEEEEEEEEERRRRRRRRRRRPPPPPPPTTTTTTTYYYYYYYYYYYYTTTTTTTNNNNNNNNLLLLLLLLNNNNNNNNRRRRRRRRRRRLLLLLLLLIIIIIIIISSSSSSQQQQQQQQQIIIIIIIIIIIIIIIISSSSSSSSSSSSLLLLLLLLTTTTTTTTTTTTTTSSSSSSLLLLLLLLRRRRRRRRRRRFFFFFFFFFFFDDDDDDDDGGGGAAAAAIIIIIIIINNNNNNNNVVVVVVVDDDDDDDDVVVVVVVTTTTTTTEEEEEEEEEFFFFFFFFFFFQQQQQQQQQTTTTTTTNNNNNNNNLLLLLLLLVVVVVVVPPPPPPPYYYYYYYYYYYYPPPPPPPRRRRRRRRRRRIIIIIIIIHHHHHHHHHHFFFFFFFFFFFMMMMMMMMLLLLLLLLSSSSSSSSSSSSYYYYYYYYYYYYAAAAAPPPPPPPVVVVVVVIIIIIIIISSSSSSAAAAAEEEEEEEEEKKKKKKKKKAAAAAYYYYYYYYYYYYHHHHHHHHHHEEEEEEEEEQQQQQQQQQLLLLLLLLSSSSSSVVVVVVVPPPPPPPEEEEEEEEEIIIIIIIITTTTTTTNNNNNNNNAAAAAVVVVVVVFFFFFFFFFFFEEEEEEEEEPPPPPPPSSSSSSSSSSSSMMMMMMMMMMMMMMMMAAAAAKKKKKKKKKCCCCCCDDDDDDDDPPPPPPPRRRRRRRRRRRHHHHHHHHHHGGGGKKKKKKKKKYYYYYYYYYYYYMMMMMMMMAAAAACCCCCCCCCCCCLLLLLLLLMMMMMMMMYYYYYYYYYYYYRRRRRRRRRRRGGGGDDDDDDDDVVVVVVVVVVVVVVPPPPPPPKKKKKKKKKDDDDDDDDVVVVVVVNNNNNNNNAAAAAAAAAAVVVVVVVAAAAATTTTTTTIIIIIIIIKKKKKKKKKTTTTTTTKKKKKKKKKRRRRRRRRRRRTTTTTTTVVVVVVVQQQQQQQQQFFFFFFFFFFFVVVVVVVDDDDDDDDWWWWWWWWWWWWWWCCCCCCPPPPPPPTTTTTTTGGGGFFFFFFFFFFFKKKKKKKKKCCCCCCGGGGIIIIIIIINNNNNNNNYYYYYYYYYYYYQQQQQQQQQPPPPPPPPPPPPPPSSSSSSVVVVVVVVVVVVVVPPPPPPPGGGGGGGGDDDDDDDDLLLLLLLLAAAAAKKKKKKKKKVVVVVVVQQQQQQQQQRRRRRRRRRRRAAAAAVVVVVVVCCCCCCMMMMMMMMIIIIIIIISSSSSSNNNNNNNNNNNNNNNNTTTTTTTAAAAAVVVVVVVAAAAAEEEEEEEEEVVVVVVVFFFFFFFFFFFSSSSSSRRRRRRRRRRRIIIIIIIIDDDDDDDDHHHHHHHHHHKKKKKKKKKFFFFFFFFFFFDDDDDDDDLLLLLLLLMMMMMMMMYYYYYYYYYYYYAAAAAKKKKKKKKKRRRRRRRRRRRAAAAAFFFFFFFFFFFVVVVVVVHHHHHHHHHHWWWWWWWWWWWWWWYYYYYYYYYYYYVVVVVVVGGGGEEEEEEEEEGGGGMMMMMMMMEEEEEEEEEEEEEEEEEEGGGGEEEEEEEEEFFFFFFFFFFFSSSSSSEEEEEEEEEAAAAARRRRRRRRRRREEEEEEEEEDDDDDDDDLLLLLLLLAAAAAAAAAALLLLLLLLEEEEEEEEEKKKKKKKKKDDDDDDDDYYYYYYYYYYYYEEEEEEEEEEEEEEEEEEVVVVVVVGGGGAAAAAEEEEEEEEEGGGGAAAAADDDDDDDDDDDDDDDDEEEEEEEEEGGGGDDDDDDDDEEEEEEEEEGGGGDDDDDDDDDDDDDDDDYYYYYYYYYYYYY

SEQ ID NO: 60 - protein, 3508 aa, Mus musculus
MMMMMMMMRRRRRRRRRRREEEEEEEEECCCCCCIIIIIIIISSSSSSIIIIIIIIHHHHHHHHHHVVVVVVVGGGGQQQQQQQQQAAAAAGGGGVVVVVVVQQQQQQQQQIIIIIIIIGGGGNNNNNNNNAAAAACCCCCCWWWWWWWWWWWWWWEEEEEEEEELLLLLLLLYYYYYYYYYYYYCCCCCCLLLLLLLLEEEEEEEEEHHHHHHHHHHGGGGIIIIIIIIQQQQQQQQQPPPPPPPDDDDDDDDGGGGQQQQQQQQQMMMMMMMMPPPPPPPSSSSSSDDDDDDDDKKKKKKKKKTTTTTTTIIIIIIIIGGGGGGGGGGGGDDDDDDDDDDDDDDDDSSSSSSFFFFFFFFFFFNNNNNNNNTTTTTTTFFFFFFFFFFFFFFFFFFFFFFSSSSSSEEEEEEEEETTTTTTTGGGGAAAAAGGGGKKKKKKKKKHHHHHHHHHHVVVVVVVPPPPPPPRRRRRRRRRRRAAAAAVVVVVVVFFFFFFFFFFFVVVVVVVDDDDDDDDLLLLLLLLEEEEEEEEEPPPPPPPTTTTTTTVVVVVVVIIIIIIIIDDDDDDDDEEEEEEEEEVVVVVVVRRRRRRRRRRRTTTTTTTGGGGTTTTTTTYYYYYYYYYYYYRRRRRRRRRRRQQQQQQQQQLLLLLLLLFFFFFFFFFFFHHHHHHHHHHPPPPPPPEEEEEEEEEQQQQQQQQQLLLLLLLLIIIIIIIITTTTTTTGGGGKKKKKKKKKEEEEEEEEEDDDDDDDDAAAAAAAAAANNNNNNNNNNNNNNNNYYYYYYYYYYYYAAAAARRRRRRRRRRRGGGGHHHHHHHHHHYYYYYYYYYYYYTTTTTTTIIIIIIIIGGGGKKKKKKKKKEEEEEEEEEIIIIIIIIIIIIIIIIDDDDDDDDLLLLLLLLVVVVVVVLLLLLLLLDDDDDDDDRRRRRRRRRRRIIIIIIIIRRRRRRRRRRRKKKKKKKKKLLLLLLLLAAAAADDDDDDDDQQQQQQQQQCCCCCCTTTTTTTGGGGLLLLLLLLQQQQQQQQQGGGGFFFFFFFFFFFLLLLLLLLVVVVVVVFFFFFFFFFFFHHHHHHHHHHSSSSSSFFFFFFFFFFFGGGGGGGGGGGGTTTTTTTGGGGSSSSSSGGGGFFFFFFFFFFFTTTTTTTSSSSSSLLLLLLLLLLLLLLLLMMMMMMMMEEEEEEEEERRRRRRRRRRRLLLLLLLLSSSSSSVVVVVVVDDDDDDDDYYYYYYYYYYYYGGGGKKKKKKKKKKKKKKKKKKSSSSSSKKKKKKKKKLLLLLLLLEEEEEEEEEFFFFFFFFFFFSSSSSSIIIIIIIIYYYYYYYYYYYYPPPPPPPAAAAAPPPPPPPQQQQQQQQQVVVVVVVSSSSSSTTTTTTTAAAAAVVVVVVVVVVVVVVEEEEEEEEEPPPPPPPYYYYYYYYYYYYNNNNNNNNSSSSSSIIIIIIIILLLLLLLLTTTTTTTTTTTTTTHHHHHHHHHHTTTTTTTTTTTTTTLLLLLLLLEEEEEEEEEHHHHHHHHHHSSSSSSDDDDDDDDCCCCCCAAAAAFFFFFFFFFFFMMMMMMMMVVVVVVVDDDDDDDDNNNNNNNNEEEEEEEEEAAAAAIIIIIIIIYYYYYYYYYYYYDDDDDDDDIIIIIIIICCCCCCRRRRRRRRRRRRRRRRRRRRRRNNNNNNNNLLLLLLLLDDDDDDDDIIIIIIIIEEEEEEEEERRRRRRRRRRRPPPPPPPTTTTTTTYYYYYYYYYYYYTTTTTTTNNNNNNNNLLLLLLLLNNNNNNNNRRRRRRRRRRRLLLLLLLLIIIIIIIISSSSSSQQQQQQQQQIIIIIIIIVVVVVVVSSSSSSSSSSSSIIIIIIIITTTTTTTAAAAASSSSSSLLLLLLLLRRRRRRRRRRRFFFFFFFFFFFDDDDDDDDGGGGAAAAALLLLLLLLNNNNNNNNVVVVVVVDDDDDDDDLLLLLLLLTTTTTTTEEEEEEEEEFFFFFFFFFFFQQQQQQQQQTTTTTTTNNNNNNNNLLLLLLLLVVVVVVVPPPPPPPYYYYYYYYYYYYPPPPPPPRRRRRRRRRRRIIIIIIIIHHHHHHHHHHFFFFFFFFFFFPPPPPPPLLLLLLLLAAAAATTTTTTTYYYYYYYYYYYYAAAAAPPPPPPPVVVVVVVIIIIIIIISSSSSSAAAAAEEEEEEEEEKKKKKKKKKAAAAAYYYYYYYYYYYYHHHHHHHHHHEEEEEEEEEQQQQQQQQQLLLLLLLLTTTTTTTVVVVVVVAAAAAEEEEEEEEEIIIIIIIITTTTTTTNNNNNNNNAAAAACCCCCCFFFFFFFFFFFEEEEEEEEEPPPPPPPAAAAANNNNNNNNQQQQQQQQQMMMMMMMMVVVVVVVKKKKKKKKKCCCCCCDDDDDDDDPPPPPPPRRRRRRRRRRRHHHHHHHHHHGGGGKKKKKKKKKYYYYYYYYYYYYMMMMMMMMAAAAACCCCCCCCCCCCLLLLLLLLLLLLLLLLYYYYYYYYYYYYRRRRRRRRRRRGGGGDDDDDDDDVVVVVVVVVVVVVVPPPPPPPKKKKKKKKKDDDDDDDDVVVVVVVNNNNNNNNAAAAAAAAAAIIIIIIIIAAAAATTTTTTTIIIIIIIIKKKKKKKKKTTTTTTTKKKKKKKKKRRRRRRRRRRRTTTTTTTIIIIIIIIQQQQQQQQQFFFFFFFFFFFVVVVVVVDDDDDDDDWWWWWWWWWWWWWWCCCCCCPPPPPPPTTTTTTTGGGGFFFFFFFFFFFKKKKKKKKKVVVVVVVGGGGIIIIIIIINNNNNNNNYYYYYYYYYYYYQQQQQQQQQPPPPPPPPPPPPPPTTTTTTTVVVVVVVVVVVVVVPPPPPPPGGGGGGGGDDDDDDDDLLLLLLLLAAAAAKKKKKKKKKVVVVVVVQQQQQQQQQRRRRRRRRRRRAAAAAVVVVVVVCCCCCCMMMMMMMMLLLLLLLLSSSSSSNNNNNNNNTTTTTTTTTTTTTTAAAAAIIIIIIIIAAAAAEEEEEEEEEAAAAAWWWWWWWWWWWWWWAAAAARRRRRRRRRRRLLLLLLLLDDDDDDDDHHHHHHHHHHKKKKKKKKKFFFFFFFFFFFDDDDDDDDLLLLLLLLMMMMMMMMYYYYYYYYYYYYAAAAAKKKKKKKKKRRRRRRRRRRRAAAAAFFFFFFFFFFFVVVVVVVHHHHHHHHHHWWWWWWWWWWWWWWYYYYYYYYYYYYVVVVVVVGGGGEEEEEEEEEGGGGMMMMMMMMEEEEEEEEEEEEEEEEEEGGGGEEEEEEEEEFFFFFFFFFFFSSSSSSEEEEEEEEEAAAAARRRRRRRRRRREEEEEEEEEDDDDDDDDMMMMMMMMAAAAAAAAAALLLLLLLLEEEEEEEEEKKKKKKKKKDDDDDDDDYYYYYYYYYYYYEEEEEEEEEEEEEEEEEEVVVVVVVGGGGAAAAADDDDDDDDSSSSSSAAAAAEEEEEEEEEGGGGDDDDDDDDDDDDDDDDEEEEEEEEEGGGGEEEEEEEEEEEEEEEEEEYYYYYYYYYYYYY

SEQ ID NO: 61 - protein, 3524 aa, Caenorhabditis elegans
MMMMMMMMRRRRRRRRRRREEEEEEEEECCCCCCVVVVVVVSSSSSSIIIIIIIIHHHHHHHHHHIIIIIIIIGGGGQQQQQQQQQAAAAAGGGGAAAAAQQQQQQQQQIIIIIIIIGGGGNNNNNNNNAAAAACCCCCCWWWWWWWWWWWWWWEEEEEEEEELLLLLLLLYYYYYYYYYYYYCCCCCCIIIIIIIIEEEEEEEEEHHHHHHHHHHGGGGLLLLLLLLDDDDDDDDEEEEEEEEEAAAAAGGGGFFFFFFFFFFFLLLLLLLLKKKKKKKKKEEEEEEEEEEEEEEEEEEEEEEEEEEEKKKKKKKKKNNNNNNNNKKKKKKKKKKKKKKKKKKQQQQQQQQQQQQQQQQQQSSSSSSLLLLLLLLQQQQQQQQQAAAAAFFFFFFFFFFFFFFFFFFFFFFSSSSSSEEEEEEEEESSSSSSMMMMMMMMNNNNNNNNGGGGKKKKKKKKKHHHHHHHHHHVVVVVVVPPPPPPPRRRRRRRRRRRAAAAAIIIIIIIIYYYYYYYYYYYYVVVVVVVDDDDDDDDLLLLLLLLEEEEEEEEEPPPPPPPTTTTTTTVVVVVVVLLLLLLLLDDDDDDDDEEEEEEEEEIIIIIIIIRRRRRRRRRRRNNNNNNNNGGGGVVVVVVVYYYYYYYYYYYYGGGGNNNNNNNNLLLLLLLLFFFFFFFFFFFHHHHHHHHHHPPPPPPPDDDDDDDDQQQQQQQQQIIIIIIIIIIIIIIIINNNNNNNNGGGGKKKKKKKKKEEEEEEEEEDDDDDDDDAAAAAAAAAANNNNNNNNNNNNNNNNYYYYYYYYYYYYAAAAARRRRRRRRRRRGGGGHHHHHHHHHHYYYYYYYYYYYYTTTTTTTIIIIIIIIGGGGKKKKKKKKKEEEEEEEEELLLLLLLLIIIIIIIIDDDDDDDDVVVVVVVVVVVVVVLLLLLLLLDDDDDDDDRRRRRRRRRRRIIIIIIIIRRRRRRRRRRRKKKKKKKKKQQQQQQQQQTTTTTTTEEEEEEEEENNNNNNNNCCCCCCEEEEEEEEEGGGGLLLLLLLLQQQQQQQQQGGGGFFFFFFFFFFFLLLLLLLLVVVVVVVFFFFFFFFFFFHHHHHHHHHHSSSSSSFFFFFFFFFFFGGGGGGGGGGGGTTTTTTTGGGGSSSSSSGGGGFFFFFFFFFFFSSSSSSSSSSSSLLLLLLLLLLLLLLLLMMMMMMMMEEEEEEEEERRRRRRRRRRRLLLLLLLLSSSSSSVVVVVVVEEEEEEEEEFFFFFFFFFFFGGGGKKKKKKKKKKKKKKKKKKSSSSSSKKKKKKKKKLLLLLLLLEEEEEEEEEFFFFFFFFFFFSSSSSSVVVVVVVYYYYYYYYYYYYPPPPPPPAAAAAPPPPPPPQQQQQQQQQVVVVVVVSSSSSSTTTTTTTSSSSSSVVVVVVVVVVVVVVEEEEEEEEEPPPPPPPYYYYYYYYYYYYNNNNNNNNSSSSSSIIIIIIIILLLLLLLLTTTTTTTTTTTTTTHHHHHHHHHHTTTTTTTTTTTTTTLLLLLLLLEEEEEEEEELLLLLLLLSSSSSSDDDDDDDDCCCCCCSSSSSSFFFFFFFFFFFMMMMMMMMVVVVVVVDDDDDDDDNNNNNNNNEEEEEEEEEAAAAAIIIIIIIIYYYYYYYYYYYYDDDDDDDDLLLLLLLLCCCCCCRRRRRRRRRRRQQQQQQQQQKKKKKKKKKLLLLLLLLHHHHHHHHHHVVVVVVVEEEEEEEEERRRRRRRRRRRPPPPPPPSSSSSSYYYYYYYYYYYYSSSSSSNNNNNNNNLLLLLLLLNNNNNNNNRRRRRRRRRRRLLLLLLLLIIIIIIIIAAAAAQQQQQQQQQVVVVVVVVVVVVVVSSSSSSSSSSSSIIIIIIIITTTTTTTAAAAASSSSSSLLLLLLLLRRRRRRRRRRRFFFFFFFFFFFDDDDDDDDGGGGAAAAALLLLLLLLNNNNNNNNVVVVVVVDDDDDDDDLLLLLLLLNNNNNNNNEEEEEEEEEFFFFFFFFFFFQQQQQQQQQTTTTTTTNNNNNNNNLLLLLLLLVVVVVVVPPPPPPPYYYYYYYYYYYYPPPPPPPRRRRRRRRRRRIIIIIIIIHHHHHHHHHHFFFFFFFFFFFPPPPPPPLLLLLLLLAAAAATTTTTTTYYYYYYYYYYYYAAAAAPPPPPPPVVVVVVVIIIIIIIISSSSSSAAAAADDDDDDDDRRRRRRRRRRRAAAAAHHHHHHHHHHHHHHHHHHHHEEEEEEEEEPPPPPPPLLLLLLLLSSSSSSVVVVVVVQQQQQQQQQDDDDDDDDIIIIIIIITTTTTTTHHHHHHHHHHMMMMMMMMCCCCCCFFFFFFFFFFFEEEEEEEEEKKKKKKKKKAAAAANNNNNNNNQQQQQQQQQMMMMMMMMVVVVVVVKKKKKKKKKCCCCCCDDDDDDDDPPPPPPPSSSSSSAAAAAGGGGKKKKKKKKKYYYYYYYYYYYYMMMMMMMMAAAAAVVVVVVVCCCCCCLLLLLLLLLLLLLLLLYYYYYYYYYYYYRRRRRRRRRRRGGGGDDDDDDDDVVVVVVVVVVVVVVPPPPPPPKKKKKKKKKDDDDDDDDVVVVVVVNNNNNNNNAAAAAAAAAAIIIIIIIISSSSSSSSSSSSVVVVVVVKKKKKKKKKAAAAAKKKKKKKKKRRRRRRRRRRRGGGGIIIIIIIINNNNNNNNFFFFFFFFFFFVVVVVVVDDDDDDDDWWWWWWWWWWWWWWCCCCCCPPPPPPPTTTTTTTGGGGFFFFFFFFFFFKKKKKKKKKVVVVVVVGGGGIIIIIIIINNNNNNNNYYYYYYYYYYYYQQQQQQQQQAAAAAPPPPPPPIIIIIIIITTTTTTTVVVVVVVEEEEEEEEEGGGGGGGGDDDDDDDDLLLLLLLLAAAAAKKKKKKKKKVVVVVVVHHHHHHHHHHRRRRRRRRRRRAAAAAVVVVVVVCCCCCCMMMMMMMMLLLLLLLLSSSSSSNNNNNNNNTTTTTTTTTTTTTTAAAAAIIIIIIIIAAAAAEEEEEEEEEAAAAAWWWWWWWWWWWWWWAAAAARRRRRRRRRRRLLLLLLLLDDDDDDDDHHHHHHHHHHKKKKKKKKKFFFFFFFFFFFDDDDDDDDLLLLLLLLMMMMMMMMYYYYYYYYYYYYSSSSSSKKKKKKKKKRRRRRRRRRRRAAAAAFFFFFFFFFFFVVVVVVVHHHHHHHHHHWWWWWWWWWWWWWWFFFFFFFFFFFVVVVVVVGGGGEEEEEEEEEGGGGMMMMMMMMEEEEEEEEEEEEEEEEEEGGGGEEEEEEEEEFFFFFFFFFFFMMMMMMMMEEEEEEEEEAAAAARRRRRRRRRRRDDDDDDDDDDDDDDDDLLLLLLLLAAAAAAAAAALLLLLLLLEEEEEEEEEKKKKKKKKKDDDDDDDDYYYYYYYYYYYYAAAAAEEEEEEEEEVVVVVVVSSSSSSRRRRRRRRRRRDDDDDDDDTTTTTTTAAAAADDDDDDDDLLLLLLLLEEEEEEEEEEEEEEEEEEEEEEEEEEENNNNNNNNDDDDDDDDEEEEEEEEEFFFFFFFFFFFF

SEQ ID NO: 62 - protein, 2539 aa, Gallus gallus
VVVVVVVDDDDDDDDQQQQQQQQQCCCCCCTTTTTTTGGGGLLLLLLLLQQQQQQQQQGGGGFFFFFFFFFFFLLLLLLLLIIIIIIIIFFFFFFFFFFFHHHHHHHHHHSSSSSSFFFFFFFFFFFGGGGGGGGGGGGTTTTTTTGGGGSSSSSSGGGGFFFFFFFFFFFTTTTTTTSSSSSSLLLLLLLLLLLLLLLLMMMMMMMMEEEEEEEEERRRRRRRRRRRLLLLLLLLSSSSSSVVVVVVVDDDDDDDDYYYYYYYYYYYYGGGGKKKKKKKKKKKKKKKKKKSSSSSSKKKKKKKKKLLLLLLLLEEEEEEEEEFFFFFFFFFFFAAAAAIIIIIIIIYYYYYYYYYYYYPPPPPPPAAAAAPPPPPPPQQQQQQQQQVVVVVVVSSSSSSTTTTTTTAAAAAVVVVVVVVVVVVVVEEEEEEEEEPPPPPPPYYYYYYYYYYYYNNNNNNNNSSSSSSIIIIIIIILLLLLLLLTTTTTTTTTTTTTTHHHHHHHHHHTTTTTTTTTTTTTTLLLLLLLLEEEEEEEEEQQQQQQQQQSSSSSSDDDDDDDDCCCCCCAAAAAFFFFFFFFFFFMMMMMMMMVVVVVVVDDDDDDDDNNNNNNNNEEEEEEEEEAAAAAIIIIIIIIYYYYYYYYYYYYDDDDDDDDIIIIIIIICCCCCCRRRRRRRRRRRRRRRRRRRRRRNNNNNNNNLLLLLLLLDDDDDDDDIIIIIIIIEEEEEEEEERRRRRRRRRRRPPPPPPPTTTTTTTYYYYYYYYYYYYTTTTTTTNNNNNNNNLLLLLLLLNNNNNNNNRRRRRRRRRRRLLLLLLLLIIIIIIIIGGGGQQQQQQQQQIIIIIIIIVVVVVVVSSSSSSSSSSSSIIIIIIIITTTTTTTAAAAASSSSSSLLLLLLLLRRRRRRRRRRRFFFFFFFFFFFDDDDDDDDGGGGAAAAALLLLLLLLNNNNNNNNVVVVVVVDDDDDDDDLLLLLLLLTTTTTTTEEEEEEEEEFFFFFFFFFFFQQQQQQQQQTTTTTTTNNNNNNNNLLLLLLLLVVVVVVVPPPPPPPYYYYYYYYYYYYPPPPPPPRRRRRRRRRRRIIIIIIIIHHHHHHHHHHFFFFFFFFFFFPPPPPPPLLLLLLLLVVVVVVVTTTTTTTYYYYYYYYYYYYSSSSSSPPPPPPPIIIIIIIIIIIIIIIISSSSSSAAAAAEEEEEEEEEKKKKKKKKKAAAAAYYYYYYYYYYYYHHHHHHHHHHEEEEEEEEEQQQQQQQQQLLLLLLLLSSSSSSVVVVVVVSSSSSSEEEEEEEEEIIIIIIIITTTTTTTNNNNNNNNAAAAACCCCCCFFFFFFFFFFFEEEEEEEEEPPPPPPPSSSSSSNNNNNNNNQQQQQQQQQMMMMMMMMVVVVVVVKKKKKKKKKCCCCCCDDDDDDDDPPPPPPPRRRRRRRRRRRHHHHHHHHHHGGGGKKKKKKKKKYYYYYYYYYYYYMMMMMMMMAAAAACCCCCCCCCCCCMMMMMMMMLLLLLLLLYYYYYYYYYYYYRRRRRRRRRRRGGGGDDDDDDDDVVVVVVVVVVVVVVPPPPPPPKKKKKKKKKDDDDDDDDVVVVVVVNNNNNNNNAAAAAAAAAAIIIIIIIIAAAAAAAAAAIIIIIIIIKKKKKKKKKTTTTTTTKKKKKKKKKRRRRRRRRRRRTTTTTTTIIIIIIIIQQQQQQQQQFFFFFFFFFFFVVVVVVVDDDDDDDDWWWWWWWWWWWWWWCCCCCCPPPPPPPTTTTTTTGGGGFFFFFFFFFFFKKKKKKKKKVVVVVVVGGGGIIIIIIIINNNNNNNNYYYYYYYYYYYYQQQQQQQQQPPPPPPPPPPPPPPTTTTTTTVVVVVVVVVVVVVVPPPPPPPGGGGGGGGDDDDDDDDLLLLLLLLAAAAAKKKKKKKKKVVVVVVVQQQQQQQQQRRRRRRRRRRRAAAAAVVVVVVVCCCCCCMMMMMMMMLLLLLLLLSSSSSSNNNNNNNNTTTTTTTTTTTTTTAAAAAIIIIIIIIAAAAAEEEEEEEEEAAAAAWWWWWWWWWWWWWWAAAAARRRRRRRRRRRLLLLLLLLDDDDDDDDHHHHHHHHHHKKKKKKKKKFFFFFFFFFFFDDDDDDDDLLLLLLLLMMMMMMMMYYYYYYYYYYYYAAAAAKKKKKKKKKRRRRRRRRRRRAAAAAFFFFFFFFFFFVVVVVVVHHHHHHHHHHWWWWWWWWWWWWWWYYYYYYYYYYYYVVVVVVVGGGGEEEEEEEEEGGGGMMMMMMMMEEEEEEEEEEEEEEEEEEGGGGEEEEEEEEEFFFFFFFFFFFSSSSSSEEEEEEEEEAAAAARRRRRRRRRRREEEEEEEEEDDDDDDDDLLLLLLLLAAAAAAAAAALLLLLLLLEEEEEEEEEKKKKKKKKKDDDDDDDDYYYYYYYYYYYYEEEEEEEEEEEEEEEEEEVVVVVVVGGGGTTTTTTTDDDDDDDDSSSSSSMMMMMMMMDDDDDDDDGGGGEEEEEEEEEDDDDDDDDEEEEEEEEEGGGGEEEEEEEEEEEEEEEEEEYYYYYYYYYYYYY

SEQ ID NO: 63 - protein, 3521 aa, Homo sapiens
MMMMMMMMRRRRRRRRRRREEEEEEEEECCCCCCIIIIIIIISSSSSSVVVVVVVHHHHHHHHHHVVVVVVVGGGGQQQQQQQQQAAAAAGGGGVVVVVVVQQQQQQQQQIIIIIIIIGGGGNNNNNNNNAAAAACCCCCCWWWWWWWWWWWWWWEEEEEEEEELLLLLLLLFFFFFFFFFFFCCCCCCLLLLLLLLEEEEEEEEEHHHHHHHHHHGGGGIIIIIIIIQQQQQQQQQAAAAADDDDDDDDGGGGTTTTTTTFFFFFFFFFFFDDDDDDDDAAAAAQQQQQQQQQAAAAASSSSSSKKKKKKKKKIIIIIIIINNNNNNNNDDDDDDDDDDDDDDDDDDDDDDDDSSSSSSFFFFFFFFFFFTTTTTTTTTTTTTTFFFFFFFFFFFFFFFFFFFFFFSSSSSSEEEEEEEEETTTTTTTGGGGNNNNNNNNGGGGKKKKKKKKKHHHHHHHHHHVVVVVVVPPPPPPPRRRRRRRRRRRAAAAAVVVVVVVMMMMMMMMIIIIIIIIDDDDDDDDLLLLLLLLEEEEEEEEEPPPPPPPTTTTTTTVVVVVVVVVVVVVVDDDDDDDDEEEEEEEEEVVVVVVVRRRRRRRRRRRAAAAAGGGGTTTTTTTYYYYYYYYYYYYRRRRRRRRRRRQQQQQQQQQLLLLLLLLFFFFFFFFFFFHHHHHHHHHHPPPPPPPEEEEEEEEEQQQQQQQQQLLLLLLLLIIIIIIIITTTTTTTGGGGKKKKKKKKKEEEEEEEEEDDDDDDDDAAAAAAAAAANNNNNNNNNNNNNNNNYYYYYYYYYYYYAAAAARRRRRRRRRRRGGGGHHHHHHHHHHYYYYYYYYYYYYTTTTTTTVVVVVVVGGGGKKKKKKKKKEEEEEEEEESSSSSSIIIIIIIIDDDDDDDDLLLLLLLLVVVVVVVLLLLLLLLDDDDDDDDRRRRRRRRRRRIIIIIIIIRRRRRRRRRRRKKKKKKKKKLLLLLLLLTTTTTTTDDDDDDDDAAAAACCCCCCSSSSSSGGGGLLLLLLLLQQQQQQQQQGGGGFFFFFFFFFFFLLLLLLLLIIIIIIIIFFFFFFFFFFFHHHHHHHHHHSSSSSSFFFFFFFFFFFGGGGGGGGGGGGTTTTTTTGGGGSSSSSSGGGGFFFFFFFFFFFTTTTTTTSSSSSSLLLLLLLLLLLLLLLLMMMMMMMMEEEEEEEEERRRRRRRRRRRLLLLLLLLSSSSSSLLLLLLLLDDDDDDDDYYYYYYYYYYYYGGGGKKKKKKKKKKKKKKKKKKSSSSSSKKKKKKKKKLLLLLLLLEEEEEEEEEFFFFFFFFFFFAAAAAIIIIIIIIYYYYYYYYYYYYPPPPPPPAAAAAPPPPPPPQQQQQQQQQVVVVVVVSSSSSSTTTTTTTAAAAAVVVVVVVVVVVVVVEEEEEEEEEPPPPPPPYYYYYYYYYYYYNNNNNNNNSSSSSSIIIIIIIILLLLLLLLTTTTTTTTTTTTTTHHHHHHHHHHTTTTTTTTTTTTTTLLLLLLLLEEEEEEEEEHHHHHHHHHHSSSSSSDDDDDDDDCCCCCCAAAAAFFFFFFFFFFFMMMMMMMMVVVVVVVDDDDDDDDNNNNNNNNEEEEEEEEEAAAAAIIIIIIIIYYYYYYYYYYYYDDDDDDDDIIIIIIIICCCCCCRRRRRRRRRRRRRRRRRRRRRRNNNNNNNNLLLLLLLLDDDDDDDDIIIIIIIIEEEEEEEEERRRRRRRRRRRPPPPPPPTTTTTTTYYYYYYYYYYYYTTTTTTTNNNNNNNNLLLLLLLLNNNNNNNNRRRRRRRRRRRLLLLLLLLIIIIIIIISSSSSSQQQQQQQQQIIIIIIIIVVVVVVVSSSSSSSSSSSSIIIIIIIITTTTTTTAAAAASSSSSSLLLLLLLLRRRRRRRRRRRFFFFFFFFFFFDDDDDDDDGGGGAAAAALLLLLLLLNNNNNNNNVVVVVVVDDDDDDDDLLLLLLLLTTTTTTTEEEEEEEEEFFFFFFFFFFFQQQQQQQQQTTTTTTTNNNNNNNNLLLLLLLLVVVVVVVPPPPPPPYYYYYYYYYYYYPPPPPPPRRRRRRRRRRRIIIIIIIIHHHHHHHHHHFFFFFFFFFFFPPPPPPPLLLLLLLLVVVVVVVTTTTTTTYYYYYYYYYYYYAAAAAPPPPPPPIIIIIIIIIIIIIIIISSSSSSAAAAAEEEEEEEEEKKKKKKKKKAAAAAYYYYYYYYYYYYHHHHHHHHHHEEEEEEEEEQQQQQQQQQLLLLLLLLSSSSSSVVVVVVVAAAAAEEEEEEEEEIIIIIIIITTTTTTTSSSSSSSSSSSSCCCCCCFFFFFFFFFFFEEEEEEEEEPPPPPPPNNNNNNNNSSSSSSQQQQQQQQQMMMMMMMMVVVVVVVKKKKKKKKKCCCCCCDDDDDDDDPPPPPPPRRRRRRRRRRRHHHHHHHHHHGGGGKKKKKKKKKYYYYYYYYYYYYMMMMMMMMAAAAACCCCCCCCCCCCMMMMMMMMLLLLLLLLYYYYYYYYYYYYRRRRRRRRRRRGGGGDDDDDDDDVVVVVVVVVVVVVVPPPPPPPKKKKKKKKKDDDDDDDDVVVVVVVNNNNNNNNVVVVVVVAAAAAIIIIIIIIAAAAAAAAAAIIIIIIIIKKKKKKKKKTTTTTTTKKKKKKKKKRRRRRRRRRRRTTTTTTTIIIIIIIIQQQQQQQQQFFFFFFFFFFFVVVVVVVDDDDDDDDWWWWWWWWWWWWWWCCCCCCPPPPPPPTTTTTTTGGGGFFFFFFFFFFFKKKKKKKKKVVVVVVVGGGGIIIIIIIINNNNNNNNYYYYYYYYYYYYQQQQQQQQQPPPPPPPPPPPPPPTTTTTTTVVVVVVVVVVVVVVPPPPPPPGGGGGGGGDDDDDDDDLLLLLLLLAAAAAKKKKKKKKKVVVVVVVQQQQQQQQQRRRRRRRRRRRAAAAAVVVVVVVCCCCCCMMMMMMMMLLLLLLLLSSSSSSNNNNNNNNTTTTTTTTTTTTTTAAAAAIIIIIIIIAAAAAEEEEEEEEEAAAAAWWWWWWWWWWWWWWAAAAARRRRRRRRRRRLLLLLLLLDDDDDDDDHHHHHHHHHHKKKKKKKKKFFFFFFFFFFFDDDDDDDDLLLLLLLLMMMMMMMMYYYYYYYYYYYYAAAAAKKKKKKKKKRRRRRRRRRRRAAAAAFFFFFFFFFFFVVVVVVVHHHHHHHHHHWWWWWWWWWWWWWWYYYYYYYYYYYYVVVVVVVGGGGEEEEEEEEEGGGGMMMMMMMMEEEEEEEEEEEEEEEEEEGGGGEEEEEEEEEFFFFFFFFFFFSSSSSSEEEEEEEEEAAAAARRRRRRRRRRREEEEEEEEEDDDDDDDDLLLLLLLLAAAAAAAAAALLLLLLLLEEEEEEEEEKKKKKKKKKDDDDDDDDYYYYYYYYYYYYEEEEEEEEEEEEEEEEEEVVVVVVVGGGGTTTTTTTDDDDDDDDSSSSSSFFFFFFFFFFFEEEEEEEEEEEEEEEEEEEEEEEEEEENNNNNNNNEEEEEEEEEGGGGEEEEEEEEEEEEEEEEEEFFFFFFFFFFFF

SEQ ID NO: 64 - protein, 3518 aa, Mus musculus
MMMMMMMMRRRRRRRRRRREEEEEEEEECCCCCCIIIIIIIISSSSSSVVVVVVVHHHHHHHHHHVVVVVVVGGGGQQQQQQQQQAAAAAGGGGVVVVVVVQQQQQQQQQIIIIIIIIGGGGNNNNNNNNAAAAACCCCCCWWWWWWWWWWWWWWEEEEEEEEELLLLLLLLFFFFFFFFFFFCCCCCCLLLLLLLLEEEEEEEEEHHHHHHHHHHGGGGIIIIIIIIQQQQQQQQQAAAAADDDDDDDDGGGGTTTTTTTFFFFFFFFFFFGGGGTTTTTTTQQQQQQQQQAAAAASSSSSSKKKKKKKKKIIIIIIIINNNNNNNNDDDDDDDDDDDDDDDDDDDDDDDDSSSSSSFFFFFFFFFFFTTTTTTTTTTTTTTFFFFFFFFFFFFFFFFFFFFFFSSSSSSEEEEEEEEETTTTTTTGGGGNNNNNNNNGGGGKKKKKKKKKHHHHHHHHHHVVVVVVVPPPPPPPRRRRRRRRRRRAAAAAVVVVVVVMMMMMMMMVVVVVVVDDDDDDDDLLLLLLLLEEEEEEEEEPPPPPPPTTTTTTTVVVVVVVVVVVVVVDDDDDDDDEEEEEEEEEVVVVVVVRRRRRRRRRRRAAAAAGGGGTTTTTTTYYYYYYYYYYYYRRRRRRRRRRRQQQQQQQQQLLLLLLLLFFFFFFFFFFFHHHHHHHHHHPPPPPPPEEEEEEEEEQQQQQQQQQLLLLLLLLIIIIIIIITTTTTTTGGGGKKKKKKKKKEEEEEEEEEDDDDDDDDAAAAAAAAAANNNNNNNNNNNNNNNNYYYYYYYYYYYYAAAAARRRRRRRRRRRGGGGHHHHHHHHHHYYYYYYYYYYYYTTTTTTTVVVVVVVGGGGKKKKKKKKKEEEEEEEEESSSSSSIIIIIIIIDDDDDDDDLLLLLLLLVVVVVVVLLLLLLLLDDDDDDDDRRRRRRRRRRRIIIIIIIIRRRRRRRRRRRKKKKKKKKKLLLLLLLLTTTTTTTDDDDDDDDAAAAACCCCCCSSSSSSGGGGLLLLLLLLQQQQQQQQQGGGGFFFFFFFFFFFLLLLLLLLIIIIIIIIFFFFFFFFFFFHHHHHHHHHHSSSSSSFFFFFFFFFFFGGGGGGGGGGGGTTTTTTTGGGGSSSSSSGGGGFFFFFFFFFFFTTTTTTTSSSSSSLLLLLLLLLLLLLLLLMMMMMMMMEEEEEEEEERRRRRRRRRRRLLLLLLLLSSSSSSLLLLLLLLDDDDDDDDYYYYYYYYYYYYGGGGKKKKKKKKKKKKKKKKKKSSSSSSKKKKKKKKKLLLLLLLLEEEEEEEEEFFFFFFFFFFFAAAAAIIIIIIIIYYYYYYYYYYYYPPPPPPPAAAAAPPPPPPPQQQQQQQQQVVVVVVVSSSSSSTTTTTTTAAAAAVVVVVVVVVVVVVVEEEEEEEEEPPPPPPPYYYYYYYYYYYYNNNNNNNNSSSSSSIIIIIIIILLLLLLLLTTTTTTTTTTTTTTHHHHHHHHHHTTTTTTTTTTTTTTLLLLLLLLEEEEEEEEEHHHHHHHHHHSSSSSSDDDDDDDDCCCCCCAAAAAFFFFFFFFFFFMMMMMMMMVVVVVVVDDDDDDDDNNNNNNNNEEEEEEEEEAAAAAIIIIIIIIYYYYYYYYYYYYDDDDDDDDIIIIIIIICCCCCCRRRRRRRRRRRRRRRRRRRRRRNNNNNNNNLLLLLLLLDDDDDDDDIIIIIIIIEEEEEEEEERRRRRRRRRRRPPPPPPPTTTTTTTYYYYYYYYYYYYTTTTTTTNNNNNNNNLLLLLLLLNNNNNNNNRRRRRRRRRRRLLLLLLLLIIIIIIIISSSSSSQQQQQQQQQIIIIIIIIVVVVVVVSSSSSSSSSSSSIIIIIIIITTTTTTTAAAAASSSSSSLLLLLLLLRRRRRRRRRRRFFFFFFFFFFFDDDDDDDDGGGGAAAAALLLLLLLLNNNNNNNNVVVVVVVDDDDDDDDLLLLLLLLTTTTTTTEEEEEEEEEFFFFFFFFFFFQQQQQQQQQTTTTTTTNNNNNNNNLLLLLLLLVVVVVVVPPPPPPPYYYYYYYYYYYYPPPPPPPRRRRRRRRRRRIIIIIIIIHHHHHHHHHHFFFFFFFFFFFPPPPPPPLLLLLLLLVVVVVVVTTTTTTTYYYYYYYYYYYYAAAAAPPPPPPPIIIIIIIIIIIIIIIISSSSSSAAAAAEEEEEEEEEKKKKKKKKKAAAAAYYYYYYYYYYYYHHHHHHHHHHEEEEEEEEEQQQQQQQQQLLLLLLLLSSSSSSVVVVVVVAAAAAEEEEEEEEEIIIIIIIITTTTTTTSSSSSSSSSSSSCCCCCCFFFFFFFFFFFEEEEEEEEEPPPPPPPNNNNNNNNSSSSSSQQQQQQQQQMMMMMMMMVVVVVVVKKKKKKKKKCCCCCCDDDDDDDDPPPPPPPRRRRRRRRRRRHHHHHHHHHHGGGGKKKKKKKKKYYYYYYYYYYYYMMMMMMMMAAAAACCCCCCCCCCCCMMMMMMMMLLLLLLLLYYYYYYYYYYYYRRRRRRRRRRRGGGGDDDDDDDDVVVVVVVVVVVVVVPPPPPPPKKKKKKKKKDDDDDDDDVVVVVVVNNNNNNNNVVVVVVVAAAAAIIIIIIIIAAAAAAAAAAIIIIIIIIKKKKKKKKKTTTTTTTKKKKKKKKKRRRRRRRRRRRTTTTTTTIIIIIIIIQQQQQQQQQFFFFFFFFFFFVVVVVVVDDDDDDDDWWWWWWWWWWWWWWCCCCCCPPPPPPPTTTTTTTGGGGFFFFFFFFFFFKKKKKKKKKVVVVVVVGGGGIIIIIIIINNNNNNNNYYYYYYYYYYYYQQQQQQQQQPPPPPPPPPPPPPPTTTTTTTVVVVVVVVVVVVVVPPPPPPPGGGGGGGGDDDDDDDDLLLLLLLLAAAAAKKKKKKKKKVVVVVVVQQQQQQQQQRRRRRRRRRRRAAAAAVVVVVVVCCCCCCMMMMMMMMLLLLLLLLSSSSSSNNNNNNNNTTTTTTTTTTTTTTAAAAAIIIIIIIIAAAAAEEEEEEEEEAAAAAWWWWWWWWWWWWWWAAAAARRRRRRRRRRRLLLLLLLLDDDDDDDDHHHHHHHHHHKKKKKKKKKFFFFFFFFFFFDDDDDDDDLLLLLLLLMMMMMMMMYYYYYYYYYYYYAAAAAKKKKKKKKKRRRRRRRRRRRAAAAAFFFFFFFFFFFVVVVVVVHHHHHHHHHHWWWWWWWWWWWWWWYYYYYYYYYYYYVVVVVVVGGGGEEEEEEEEEGGGGMMMMMMMMEEEEEEEEEEEEEEEEEEGGGGEEEEEEEEEFFFFFFFFFFFSSSSSSEEEEEEEEEAAAAARRRRRRRRRRREEEEEEEEEDDDDDDDDLLLLLLLLAAAAAAAAAALLLLLLLLEEEEEEEEEKKKKKKKKKDDDDDDDDYYYYYYYYYYYYEEEEEEEEEEEEEEEEEEVVVVVVVGGGGTTTTTTTDDDDDDDDSSSSSSFFFFFFFFFFFEEEEEEEEEEEEEEEEEEEEEEEEEEENNNNNNNNEEEEEEEEEGGGGEEEEEEEEEEEEEEEEEEFFFFFFFFFFFF

SEQ ID NO: 65 - protein, 3270 aa, Ajellomyces capsulatus
MMMMMMMMRRRRRRRRRRREEEEEEEEEVVVVVVVVVVVVVVSSSSSSLLLLLLLLNNNNNNNNVVVVVVVGGGGQQQQQQQQQAAAAAGGGGGGGGQQQQQQQQQIIIIIIIIAAAAANNNNNNNNSSSSSSCCCCCCWWWWWWWWWWWWWWEEEEEEEEELLLLLLLLYYYYYYYYYYYYCCCCCCLLLLLLLLEEEEEEEEEHHHHHHHHHHGGGGIIIIIIIIQQQQQQQQQPPPPPPPDDDDDDDDGGGGYYYYYYYYYYYYLLLLLLLLTTTTTTTEEEEEEEEEEEEEEEEEERRRRRRRRRRRKKKKKKKKKAAAAAAAAAADDDDDDDDPPPPPPPDDDDDDDDQQQQQQQQQGGGGFFFFFFFFFFFNNNNNNNNTTTTTTTFFFFFFFFFFFFFFFFFFFFFFSSSSSSEEEEEEEEETTTTTTTGGGGQQQQQQQQQGGGGKKKKKKKKKYYYYYYYYYYYYVVVVVVVPPPPPPPRRRRRRRRRRRTTTTTTTIIIIIIIIYYYYYYYYYYYYCCCCCCDDDDDDDDLLLLLLLLEEEEEEEEEPPPPPPPNNNNNNNNVVVVVVVVVVVVVVDDDDDDDDEEEEEEEEEVVVVVVVRRRRRRRRRRRTTTTTTTGGGGPPPPPPPYYYYYYYYYYYYRRRRRRRRRRRAAAAALLLLLLLLFFFFFFFFFFFHHHHHHHHHHPPPPPPPEEEEEEEEEQQQQQQQQQMMMMMMMMIIIIIIIITTTTTTTGGGGKKKKKKKKKEEEEEEEEEDDDDDDDDAAAAASSSSSSNNNNNNNNNNNNNNNNYYYYYYYYYYYYAAAAARRRRRRRRRRRGGGGHHHHHHHHHHYYYYYYYYYYYYTTTTTTTVVVVVVVGGGGKKKKKKKKKEEEEEEEEEMMMMMMMMIIIIIIIIDDDDDDDDQQQQQQQQQCCCCCCLLLLLLLLDDDDDDDDKKKKKKKKKVVVVVVVRRRRRRRRRRRRRRRRRRRRRRVVVVVVVAAAAADDDDDDDDNNNNNNNNCCCCCCSSSSSSGGGGLLLLLLLLQQQQQQQQQGGGGFFFFFFFFFFFLLLLLLLLVVVVVVVFFFFFFFFFFFHHHHHHHHHHSSSSSSFFFFFFFFFFFGGGGGGGGGGGGQQQQQQQQQGGGGSSSSSSGGGGFFFFFFFFFFFGGGGAAAAALLLLLLLLLLLLLLLLMMMMMMMMEEEEEEEEERRRRRRRRRRRLLLLLLLLSSSSSSVVVVVVVDDDDDDDDYYYYYYYYYYYYGGGGKKKKKKKKKKKKKKKKKKTTTTTTTKKKKKKKKKLLLLLLLLEEEEEEEEEFFFFFFFFFFFCCCCCCVVVVVVVYYYYYYYYYYYYPPPPPPPAAAAAPPPPPPPQQQQQQQQQNNNNNNNNAAAAATTTTTTTSSSSSSVVVVVVVVVVVVVVEEEEEEEEEPPPPPPPYYYYYYYYYYYYNNNNNNNNSSSSSSIIIIIIIILLLLLLLLTTTTTTTTTTTTTTHHHHHHHHHHTTTTTTTTTTTTTTLLLLLLLLEEEEEEEEEHHHHHHHHHHSSSSSSDDDDDDDDVVVVVVVQQQQQQQQQFFFFFFFFFFFMMMMMMMMVVVVVVVDDDDDDDDNNNNNNNNEEEEEEEEEAAAAAIIIIIIIIYYYYYYYYYYYYDDDDDDDDIIIIIIIICCCCCCRRRRRRRRRRRRRRRRRRRRRRNNNNNNNNLLLLLLLLGGGGIIIIIIIIEEEEEEEEERRRRRRRRRRRPPPPPPPSSSSSSYYYYYYYYYYYYEEEEEEEEENNNNNNNNSSSSSSNNNNNNNNRRRRRRRRRRRLLLLLLLLMMMMMMMMAAAAAQQQQQQQQQGGGGQQQQQQQQQSSSSSSPPPPPPPIIIIIIIITTTTTTTAAAAAIIIIIIIIMMMMMMMMLLLLLLLLLLLLLLLLFFFFFFFFFFFDDDDDDDDCCCCCCAAAAALLLLLLLLNNNNNNNNVVVVVVVDDDDDDDDLLLLLLLLNNNNNNNNEEEEEEEEEFFFFFFFFFFFQQQQQQQQQTTTTTTTNNNNNNNNLLLLLLLLVVVVVVVPPPPPPPYYYYYYYYYYYYPPPPPPPRRRRRRRRRRRIIIIIIIIHHHHHHHHHHFFFFFFFFFFFPPPPPPPLLLLLLLLAAAAASSSSSSYYYYYYYYYYYYSSSSSSPPPPPPPVVVVVVVVVVVVVVSSSSSSAAAAAGGGGKKKKKKKKKAAAAASSSSSSHHHHHHHHHHEEEEEEEEESSSSSSNNNNNNNNSSSSSSVVVVVVVMMMMMMMMEEEEEEEEEVVVVVVVTTTTTTTIIIIIIIIVVVVVVVCCCCCCFFFFFFFFFFFEEEEEEEEEPPPPPPPNNNNNNNNNNNNNNNNQQQQQQQQQMMMMMMMMVVVVVVVKKKKKKKKKCCCCCCDDDDDDDDPPPPPPPRRRRRRRRRRRNNNNNNNNGGGGKKKKKKKKKYYYYYYYYYYYYMMMMMMMMAAAAATTTTTTTCCCCCCLLLLLLLLLLLLLLLLYYYYYYYYYYYYRRRRRRRRRRRGGGGDDDDDDDDVVVVVVVVVVVVVVPPPPPPPKKKKKKKKKDDDDDDDDVVVVVVVHHHHHHHHHHAAAAAVVVVVVVAAAAAAAAAATTTTTTTLLLLLLLLKKKKKKKKKTTTTTTTKKKKKKKKKRRRRRRRRRRRTTTTTTTVVVVVVVQQQQQQQQQFFFFFFFFFFFVVVVVVVDDDDDDDDLLLLLLLLQQQQQQQQQPPPPPPPTTTTTTTGGGGFFFFFFFFFFFKKKKKKKKKIIIIIIIIGGGGIIIIIIIICCCCCCYYYYYYYYYYYYQQQQQQQQQPPPPPPPPPPPPPPTTTTTTTMMMMMMMMVVVVVVVPPPPPPPNNNNNNNNGGGGDDDDDDDDLLLLLLLLAAAAAKKKKKKKKKVVVVVVVNNNNNNNNRRRRRRRRRRRAAAAACCCCCCMMMMMMMMLLLLLLLLSSSSSSNNNNNNNNTTTTTTTTTTTTTTAAAAAIIIIIIIISSSSSSEEEEEEEEEAAAAAWWWWWWWWWWWWWWTTTTTTTAAAAALLLLLLLLSSSSSSHHHHHHHHHHKKKKKKKKKFFFFFFFFFFFDDDDDDDDLLLLLLLLIIIIIIIIYYYYYYYYYYYYSSSSSSKKKKKKKKKRRRRRRRRRRRAAAAAFFFFFFFFFFFVVVVVVVHHHHHHHHHHWWWWWWWWWWWWWWYYYYYYYYYYYYVVVVVVVGGGGEEEEEEEEEGGGGMMMMMMMMEEEEEEEEEEEEEEEEEEGGGGEEEEEEEEEFFFFFFFFFFFF

SEQ ID NO: 66 - protein, 1675 aa, Pneumocystis carinii
VVVVVVVDDDDDDDDNNNNNNNNEEEEEEEEEAAAAAIIIIIIIIYYYYYYYYYYYYDDDDDDDDIIIIIIIICCCCCCRRRRRRRRRRRRRRRRRRRRRRNNNNNNNNLLLLLLLLGGGGIIIIIIIIEEEEEEEEERRRRRRRRRRRPPPPPPPGGGGYYYYYYYYYYYYTTTTTTTNNNNNNNNLLLLLLLLNNNNNNNNRRRRRRRRRRRLLLLLLLLIIIIIIIIAAAAAHHHHHHHHHHVVVVVVVVVVVVVVSSSSSSSSSSSSIIIIIIIITTTTTTTAAAAASSSSSSLLLLLLLLRRRRRRRRRRRFFFFFFFFFFFDDDDDDDDGGGGSSSSSSLLLLLLLLNNNNNNNNVVVVVVVDDDDDDDDLLLLLLLLNNNNNNNNEEEEEEEEEFFFFFFFFFFFQQQQQQQQQTTTTTTTNNNNNNNNLLLLLLLLVVVVVVVPPPPPPPYYYYYYYYYYYYPPPPPPPRRRRRRRRRRRIIIIIIIIHHHHHHHHHHFFFFFFFFFFFPPPPPPPLLLLLLLLVVVVVVVTTTTTTTYYYYYYYYYYYYAAAAAPPPPPPPVVVVVVVIIIIIIIISSSSSSAAAAAAAAAAKKKKKKKKKAAAAAVVVVVVVHHHHHHHHHHEEEEEEEEEAAAAANNNNNNNNSSSSSSVVVVVVVSSSSSSEEEEEEEEEIIIIIIIITTTTTTTNNNNNNNNAAAAACCCCCCFFFFFFFFFFFEEEEEEEEEPPPPPPPNNNNNNNNNNNNNNNNQQQQQQQQQMMMMMMMMVVVVVVVKKKKKKKKKCCCCCCDDDDDDDDPPPPPPPRRRRRRRRRRRNNNNNNNNGGGGKKKKKKKKKYYYYYYYYYYYYMMMMMMMMAAAAATTTTTTTCCCCCCLLLLLLLLLLLLLLLLYYYYYYYYYYYYRRRRRRRRRRRGGGGDDDDDDDDVVVVVVVVVVVVVVTTTTTTTKKKKKKKKKDDDDDDDDVVVVVVVNNNNNNNNAAAAAAAAAAVVVVVVVAAAAAAAAAAVVVVVVVRRRRRRRRRRRTTTTTTTKKKKKKKKKRRRRRRRRRRRTTTTTTTIIIIIIIIQQQQQQQQQFFFFFFFFFFFVVVVVVVDDDDDDDDWWWWWWWWWWWWWWCCCCCCPPPPPPPTTTTTTTGGGGFFFFFFFFFFFKKKKKKKKKLLLLLLLLGGGGVVVVVVVCCCCCCYYYYYYYYYYYYQQQQQQQQQPPPPPPPPPPPPPPQQQQQQQQQHHHHHHHHHHVVVVVVVPPPPPPPHHHHHHHHHHGGGGDDDDDDDDLLLLLLLLAAAAAKKKKKKKKKVVVVVVVDDDDDDDDRRRRRRRRRRRAAAAAVVVVVVVCCCCCCMMMMMMMMLLLLLLLLSSSSSSNNNNNNNNTTTTTTTTTTTTTTSSSSSSIIIIIIIIAAAAAEEEEEEEEEAAAAAWWWWWWWWWWWWWWPPPPPPPRRRRRRRRRRRLLLLLLLLDDDDDDDDHHHHHHHHHHKKKKKKKKKFFFFFFFFFFFDDDDDDDDLLLLLLLLMMMMMMMMYYYYYYYYYYYYSSSSSSKKKKKKKKKRRRRRRRRRRRAAAAAFFFFFFFFFFFVVVVVVVHHHHHHHHHHWWWWWWWWWWWWWWYYYYYYYYYYYYVVVVVVVGGGGEEEEEEEEEGGGGMMMMMMMMEEEEEEEEEEEEEEEEEEE

SEQ ID NO: 67 - protein, 3475 aa, Schizophyllum commune
MMMMMMMMRRRRRRRRRRREEEEEEEEEVVVVVVVVVVVVVVSSSSSSIIIIIIIIHHHHHHHHHHVVVVVVVGGGGQQQQQQQQQAAAAAGGGGVVVVVVVQQQQQQQQQIIIIIIIIGGGGNNNNNNNNAAAAACCCCCCWWWWWWWWWWWWWWEEEEEEEEELLLLLLLLYYYYYYYYYYYYTTTTTTTIIIIIIIIEEEEEEEEEHHHHHHHHHHGGGGLLLLLLLLSSSSSSPPPPPPPDDDDDDDDGGGGRRRRRRRRRRRLLLLLLLLSSSSSSDDDDDDDDDDDDDDDDSSSSSSPPPPPPPSSSSSSKKKKKKKKKHHHHHHHHHHDDDDDDDDDDDDDDDDGGGGFFFFFFFFFFFSSSSSSTTTTTTTFFFFFFFFFFFFFFFFFFFFFFSSSSSSEEEEEEEEETTTTTTTSSSSSSSSSSSSGGGGKKKKKKKKKYYYYYYYYYYYYVVVVVVVPPPPPPPRRRRRRRRRRRSSSSSSLLLLLLLLYYYYYYYYYYYYVVVVVVVDDDDDDDDLLLLLLLLEEEEEEEEEPPPPPPPNNNNNNNNVVVVVVVIIIIIIIIDDDDDDDDEEEEEEEEEVVVVVVVRRRRRRRRRRRNNNNNNNNGGGGPPPPPPPYYYYYYYYYYYYRRRRRRRRRRRSSSSSSLLLLLLLLFFFFFFFFFFFHHHHHHHHHHPPPPPPPEEEEEEEEETTTTTTTMMMMMMMMIIIIIIIITTTTTTTGGGGKKKKKKKKKEEEEEEEEEDDDDDDDDAAAAAAAAAASSSSSSNNNNNNNNYYYYYYYYYYYYAAAAARRRRRRRRRRRGGGGHHHHHHHHHHYYYYYYYYYYYYTTTTTTTIIIIIIIIGGGGKKKKKKKKKEEEEEEEEEQQQQQQQQQIIIIIIIIDDDDDDDDVVVVVVVVVVVVVVMMMMMMMMDDDDDDDDKKKKKKKKKVVVVVVVRRRRRRRRRRRRRRRRRRRRRRLLLLLLLLVVVVVVVDDDDDDDDNNNNNNNNCCCCCCNNNNNNNNGGGGLLLLLLLLQQQQQQQQQGGGGFFFFFFFFFFFFFFFFFFFFFFVVVVVVVFFFFFFFFFFFHHHHHHHHHHSSSSSSFFFFFFFFFFFGGGGGGGGGGGGTTTTTTTGGGGSSSSSSGGGGFFFFFFFFFFFGGGGAAAAALLLLLLLLIIIIIIIILLLLLLLLEEEEEEEEERRRRRRRRRRRLLLLLLLLSSSSSSTTTTTTTDDDDDDDDYYYYYYYYYYYYGGGGKKKKKKKKKKKKKKKKKKSSSSSSKKKKKKKKKLLLLLLLLEEEEEEEEEFFFFFFFFFFFSSSSSSVVVVVVVYYYYYYYYYYYYPPPPPPPAAAAAPPPPPPPTTTTTTTLLLLLLLLAAAAASSSSSSSSSSSSVVVVVVVVVVVVVVEEEEEEEEEPPPPPPPYYYYYYYYYYYYNNNNNNNNSSSSSSVVVVVVVLLLLLLLLTTTTTTTTTTTTTTHHHHHHHHHHTTTTTTTTTTTTTTLLLLLLLLEEEEEEEEEHHHHHHHHHHSSSSSSDDDDDDDDCCCCCCSSSSSSFFFFFFFFFFFMMMMMMMMVVVVVVVDDDDDDDDNNNNNNNNEEEEEEEEEAAAAAIIIIIIIIYYYYYYYYYYYYDDDDDDDDIIIIIIIICCCCCCKKKKKKKKKKKKKKKKKKNNNNNNNNLLLLLLLLNNNNNNNNIIIIIIIIAAAAAQQQQQQQQQPPPPPPPGGGGLLLLLLLLTTTTTTTNNNNNNNNLLLLLLLLNNNNNNNNRRRRRRRRRRRLLLLLLLLIIIIIIIIAAAAAQQQQQQQQQVVVVVVVVVVVVVVSSSSSSSSSSSSIIIIIIIITTTTTTTAAAAASSSSSSLLLLLLLLRRRRRRRRRRRFFFFFFFFFFFDDDDDDDDGGGGSSSSSSLLLLLLLLNNNNNNNNVVVVVVVDDDDDDDDLLLLLLLLNNNNNNNNEEEEEEEEEFFFFFFFFFFFQQQQQQQQQTTTTTTTNNNNNNNNLLLLLLLLVVVVVVVPPPPPPPFFFFFFFFFFFPPPPPPPRRRRRRRRRRRIIIIIIIIHHHHHHHHHHFFFFFFFFFFFPPPPPPPLLLLLLLLAAAAATTTTTTTLLLLLLLLAAAAAPPPPPPPIIIIIIIIVVVVVVVSSSSSSVVVVVVVDDDDDDDDKKKKKKKKKAAAAAGGGGHHHHHHHHHHEEEEEEEEESSSSSSNNNNNNNNSSSSSSVVVVVVVAAAAAEEEEEEEEEMMMMMMMMTTTTTTTYYYYYYYYYYYYSSSSSSCCCCCCFFFFFFFFFFFEEEEEEEEEPPPPPPPGGGGNNNNNNNNQQQQQQQQQMMMMMMMMVVVVVVVKKKKKKKKKCCCCCCDDDDDDDDPPPPPPPRRRRRRRRRRRDDDDDDDDGGGGKKKKKKKKKYYYYYYYYYYYYMMMMMMMMAAAAACCCCCCAAAAALLLLLLLLLLLLLLLLYYYYYYYYYYYYRRRRRRRRRRRGGGGDDDDDDDDVVVVVVVVVVVVVVPPPPPPPKKKKKKKKKDDDDDDDDTTTTTTTNNNNNNNNAAAAAAAAAAVVVVVVVAAAAALLLLLLLLIIIIIIIIKKKKKKKKKTTTTTTTKKKKKKKKKRRRRRRRRRRRTTTTTTTIIIIIIIIQQQQQQQQQFFFFFFFFFFFVVVVVVVDDDDDDDDWWWWWWWWWWWWWWCCCCCCPPPPPPPTTTTTTTGGGGFFFFFFFFFFFKKKKKKKKKLLLLLLLLGGGGIIIIIIIICCCCCCNNNNNNNNEEEEEEEEEPPPPPPPPPPPPPPAAAAAHHHHHHHHHHVVVVVVVPPPPPPPGGGGGGGGDDDDDDDDLLLLLLLLAAAAAKKKKKKKKKVVVVVVVKKKKKKKKKRRRRRRRRRRRSSSSSSMMMMMMMMCCCCCCMMMMMMMMLLLLLLLLSSSSSSNNNNNNNNTTTTTTTTTTTTTTAAAAAIIIIIIIISSSSSSSSSSSSAAAAAWWWWWWWWWWWWWWSSSSSSRRRRRRRRRRRLLLLLLLLDDDDDDDDHHHHHHHHHHKKKKKKKKKFFFFFFFFFFFDDDDDDDDLLLLLLLLLLLLLLLLYYYYYYYYYYYYSSSSSSKKKKKKKKKRRRRRRRRRRRAAAAAFFFFFFFFFFFVVVVVVVHHHHHHHHHHWWWWWWWWWWWWWWYYYYYYYYYYYYVVVVVVVGGGGEEEEEEEEEGGGGMMMMMMMMEEEEEEEEEEEEEEEEEEGGGGEEEEEEEEEFFFFFFFFFFFSSSSSSEEEEEEEEEAAAAARRRRRRRRRRRQQQQQQQQQDDDDDDDDLLLLLLLLAAAAAAAAAALLLLLLLLEEEEEEEEEKKKKKKKKKDDDDDDDDYYYYYYYYYYYYEEEEEEEEEEEEEEEEEEVVVVVVVGGGGMMMMMMMMDDDDDDDDSSSSSSAAAAADDDDDDDDAAAAAEEEEEEEEEEEEEEEEEEEEEEEEEEEAAAAAAAAAAEEEEEEEEEYYYYYYYYYYYYY

SEQ ID NO: 68 - protein, 3445 aa, Avena sativa
MMMMMMMMRRRRRRRRRRREEEEEEEEEIIIIIIIIIIIIIIIISSSSSSIIIIIIIIHHHHHHHHHHIIIIIIIIGGGGQQQQQQQQQAAAAAGGGGIIIIIIIIQQQQQQQQQVVVVVVVGGGGNNNNNNNNAAAAACCCCCCWWWWWWWWWWWWWWEEEEEEEEELLLLLLLLYYYYYYYYYYYYCCCCCCLLLLLLLLEEEEEEEEEHHHHHHHHHHGGGGIIIIIIIIQQQQQQQQQQQQQQQQQQDDDDDDDDGGGGTTTTTTTMMMMMMMMPPPPPPPSSSSSSDDDDDDDDTTTTTTTTTTTTTTVVVVVVVGGGGVVVVVVVAAAAAHHHHHHHHHHDDDDDDDDAAAAAFFFFFFFFFFFNNNNNNNNTTTTTTTFFFFFFFFFFFFFFFFFFFFFFSSSSSSEEEEEEEEETTTTTTTGGGGAAAAAGGGGKKKKKKKKKHHHHHHHHHHVVVVVVVPPPPPPPRRRRRRRRRRRAAAAAIIIIIIIIFFFFFFFFFFFVVVVVVVDDDDDDDDLLLLLLLLEEEEEEEEEPPPPPPPTTTTTTTVVVVVVVIIIIIIIIDDDDDDDDEEEEEEEEEVVVVVVVRRRRRRRRRRRTTTTTTTGGGGAAAAAYYYYYYYYYYYYRRRRRRRRRRRQQQQQQQQQLLLLLLLLFFFFFFFFFFFHHHHHHHHHHPPPPPPPEEEEEEEEEQQQQQQQQQLLLLLLLLIIIIIIIISSSSSSGGGGKKKKKKKKKEEEEEEEEEDDDDDDDDAAAAAAAAAANNNNNNNNNNNNNNNNFFFFFFFFFFFAAAAARRRRRRRRRRRGGGGHHHHHHHHHHYYYYYYYYYYYYTTTTTTTVVVVVVVGGGGKKKKKKKKKEEEEEEEEEIIIIIIIIVVVVVVVDDDDDDDDLLLLLLLLCCCCCCLLLLLLLLGGGGRRRRRRRRRRRVVVVVVVRRRRRRRRRRRQQQQQQQQQLLLLLLLLAAAAADDDDDDDDNNNNNNNNCCCCCCTTTTTTTGGGGLLLLLLLLQQQQQQQQQGGGGFFFFFFFFFFFLLLLLLLLVVVVVVVFFFFFFFFFFFNNNNNNNNAAAAAVVVVVVVGGGGGGGGGGGGTTTTTTTGGGGSSSSSSGGGGLLLLLLLLGGGGSSSSSSLLLLLLLLLLLLLLLLLLLLLLLLEEEEEEEEERRRRRRRRRRRLLLLLLLLSSSSSSVVVVVVVDDDDDDDDYYYYYYYYYYYYGGGGKKKKKKKKKKKKKKKKKKSSSSSSKKKKKKKKKLLLLLLLLGGGGFFFFFFFFFFFTTTTTTTIIIIIIIIYYYYYYYYYYYYPPPPPPPSSSSSSPPPPPPPQQQQQQQQQVVVVVVVSSSSSSTTTTTTTAAAAAVVVVVVVVVVVVVVEEEEEEEEEPPPPPPPYYYYYYYYYYYYNNNNNNNNSSSSSSVVVVVVVLLLLLLLLSSSSSSTTTTTTTHHHHHHHHHHSSSSSSLLLLLLLLLLLLLLLLEEEEEEEEEHHHHHHHHHHTTTTTTTDDDDDDDDVVVVVVVAAAAAVVVVVVVLLLLLLLLLLLLLLLLDDDDDDDDNNNNNNNNEEEEEEEEEAAAAAIIIIIIIIYYYYYYYYYYYYDDDDDDDDIIIIIIIICCCCCCRRRRRRRRRRRRRRRRRRRRRRSSSSSSLLLLLLLLDDDDDDDDIIIIIIIIEEEEEEEEERRRRRRRRRRRPPPPPPPTTTTTTTYYYYYYYYYYYYTTTTTTTNNNNNNNNLLLLLLLLNNNNNNNNRRRRRRRRRRRLLLLLLLLIIIIIIIISSSSSSQQQQQQQQQIIIIIIIIIIIIIIIISSSSSSSSSSSSLLLLLLLLTTTTTTTTTTTTTTSSSSSSLLLLLLLLRRRRRRRRRRRFFFFFFFFFFFDDDDDDDDGGGGAAAAAIIIIIIIINNNNNNNNVVVVVVVDDDDDDDDVVVVVVVTTTTTTTEEEEEEEEEFFFFFFFFFFFQQQQQQQQQTTTTTTTNNNNNNNNLLLLLLLLVVVVVVVPPPPPPPYYYYYYYYYYYYPPPPPPPRRRRRRRRRRRIIIIIIIIHHHHHHHHHHFFFFFFFFFFFMMMMMMMMLLLLLLLLSSSSSSSSSSSSYYYYYYYYYYYYAAAAAPPPPPPPVVVVVVVIIIIIIIISSSSSSAAAAAEEEEEEEEEKKKKKKKKKAAAAAYYYYYYYYYYYYHHHHHHHHHHEEEEEEEEEQQQQQQQQQLLLLLLLLSSSSSSVVVVVVVPPPPPPPEEEEEEEEEIIIIIIIITTTTTTTNNNNNNNNAAAAAVVVVVVVFFFFFFFFFFFEEEEEEEEEPPPPPPPSSSSSSSSSSSSMMMMMMMMMMMMMMMMAAAAAKKKKKKKKKCCCCCCDDDDDDDDPPPPPPPRRRRRRRRRRRHHHHHHHHHHGGGGKKKKKKKKKYYYYYYYYYYYYMMMMMMMMAAAAACCCCCCCCCCCCLLLLLLLLMMMMMMMMYYYYYYYYYYYYRRRRRRRRRRRGGGGDDDDDDDDVVVVVVVVVVVVVVPPPPPPPKKKKKKKKKDDDDDDDDVVVVVVVNNNNNNNNAAAAAAAAAAVVVVVVVVVVVVVVTTTTTTTIIIIIIIIKKKKKKKKKTTTTTTTKKKKKKKKKRRRRRRRRRRRTTTTTTTVVVVVVVQQQQQQQQQFFFFFFFFFFFVVVVVVVDDDDDDDDGGGGCCCCCCPPPPPPPTTTTTTTGGGGFFFFFFFFFFFKKKKKKKKKCCCCCCGGGGIIIIIIIINNNNNNNNYYYYYYYYYYYYQQQQQQQQQPPPPPPPPPPPPPPSSSSSSVVVVVVVVVVVVVVPPPPPPPGGGGGGGGDDDDDDDDLLLLLLLLAAAAAKKKKKKKKKVVVVVVVQQQQQQQQQRRRRRRRRRRRAAAAAVVVVVVVCCCCCCMMMMMMMMIIIIIIIISSSSSSNNNNNNNNNNNNNNNNTTTTTTTAAAAAVVVVVVVAAAAAEEEEEEEEEVVVVVVVFFFFFFFFFFFSSSSSSRRRRRRRRRRRIIIIIIIIDDDDDDDDHHHHHHHHHHKKKKKKKKKFFFFFFFFFFFDDDDDDDDLLLLLLLLMMMMMMMMYYYYYYYYYYYYAAAAAKKKKKKKKKRRRRRRRRRRRAAAAAFFFFFFFFFFFVVVVVVVHHHHHHHHHHWWWWWWWWWWWWWWYYYYYYYYYYYYVVVVVVVGGGGEEEEEEEEEGGGGMMMMMMMMEEEEEEEEEEEEEEEEEEGGGGEEEEEEEEEFFFFFFFFFFFSSSSSSEEEEEEEEEAAAAARRRRRRRRRRREEEEEEEEEDDDDDDDDLLLLLLLLAAAAAGGGGLLLLLLLLEEEEEEEEEKKKKKKKKKGGGGYYYYYYYYYYYYEEEEEEEEEEEEEEEEEEVVVVVVVGGGGAAAAAEEEEEEEEEGGGGAAAAADDDDDDDDDDDDDDDDEEEEEEEEEVVVVVVVTTTTTTTRRRRRRRRRRRGGGGG

SEQ ID NO: 69 - protein, 399 aa, Blepharisma japonicum
FFFFFFFFFFFVVVVVVVHHHHHHHHHHWWWWWWWWWWWWWWYYYYYYYYYYYYVVVVVVVGGGGEEEEEEEEEGGGGMMMMMMMMEEEEEEEEEEEEEEEEEEGGGGEEEEEEEEEFFFFFFFFFFFSSSSSSEEEEEEEEEAAAAARRRRRRRRRRREEEEEEEEEDDDDDDDDLLLLLLLLAAAAAAAAAALLLLLLLLEEEEEEEEEKKKKKKKKKDDDDDDDDYYYYYYYYYYYYEEEEEEEEEEEEEEEEEEVVVVVVVGGGGIIIIIIIIEEEEEEEEETTTTTTTAAAAAEEEEEEEEEAAAAAEEEEEEEEEGGGGEEEEEEEEEEEEEEEEEEEEEEEEEEEGGGGYYYYYYYYYYYYGGGGEEEEEEEEEEEEEEEEEELLLLLLLLL

SEQ ID NO: 70 - protein, 3507 aa, Bombyx mori
MMMMMMMMRRRRRRRRRRREEEEEEEEECCCCCCIIIIIIIISSSSSSVVVVVVVHHHHHHHHHHVVVVVVVGGGGQQQQQQQQQAAAAAGGGGVVVVVVVQQQQQQQQQIIIIIIIIGGGGNNNNNNNNAAAAACCCCCCWWWWWWWWWWWWWWEEEEEEEEELLLLLLLLYYYYYYYYYYYYCCCCCCLLLLLLLLEEEEEEEEEHHHHHHHHHHGGGGIIIIIIIIQQQQQQQQQPPPPPPPDDDDDDDDGGGGQQQQQQQQQMMMMMMMMPPPPPPPTTTTTTTDDDDDDDDKKKKKKKKKTTTTTTTIIIIIIIIGGGGGGGGGGGGDDDDDDDDDDDDDDDDSSSSSSFFFFFFFFFFFNNNNNNNNTTTTTTTFFFFFFFFFFFFFFFFFFFFFFSSSSSSEEEEEEEEETTTTTTTGGGGAAAAAGGGGKKKKKKKKKHHHHHHHHHHVVVVVVVPPPPPPPRRRRRRRRRRRAAAAALLLLLLLLFFFFFFFFFFFVVVVVVVDDDDDDDDLLLLLLLLEEEEEEEEEPPPPPPPTTTTTTTVVVVVVVVVVVVVVDDDDDDDDEEEEEEEEEVVVVVVVRRRRRRRRRRRTTTTTTTGGGGTTTTTTTYYYYYYYYYYYYRRRRRRRRRRRQQQQQQQQQLLLLLLLLFFFFFFFFFFFHHHHHHHHHHPPPPPPPEEEEEEEEEQQQQQQQQQLLLLLLLLIIIIIIIITTTTTTTGGGGKKKKKKKKKEEEEEEEEEDDDDDDDDAAAAAAAAAANNNNNNNNNNNNNNNNYYYYYYYYYYYYAAAAARRRRRRRRRRRGGGGHHHHHHHHHHYYYYYYYYYYYYTTTTTTTIIIIIIIIGGGGKKKKKKKKKEEEEEEEEEIIIIIIIIVVVVVVVDDDDDDDDLLLLLLLLVVVVVVVLLLLLLLLDDDDDDDDRRRRRRRRRRRIIIIIIIIRRRRRRRRRRRKKKKKKKKKLLLLLLLLAAAAADDDDDDDDQQQQQQQQQCCCCCCTTTTTTTGGGGLLLLLLLLQQQQQQQQQGGGGFFFFFFFFFFFLLLLLLLLIIIIIIIIFFFFFFFFFFFHHHHHHHHHHSSSSSSFFFFFFFFFFFGGGGGGGGGGGGTTTTTTTGGGGSSSSSSGGGGFFFFFFFFFFFTTTTTTTSSSSSSLLLLLLLLLLLLLLLLMMMMMMMMEEEEEEEEERRRRRRRRRRRLLLLLLLLSSSSSSVVVVVVVDDDDDDDDYYYYYYYYYYYYGGGGKKKKKKKKKKKKKKKKKKSSSSSSKKKKKKKKKLLLLLLLLEEEEEEEEEFFFFFFFFFFFAAAAAIIIIIIIIYYYYYYYYYYYYPPPPPPPAAAAAPPPPPPPQQQQQQQQQVVVVVVVSSSSSSTTTTTTTAAAAAVVVVVVVVVVVVVVEEEEEEEEEPPPPPPPYYYYYYYYYYYYNNNNNNNNSSSSSSIIIIIIIILLLLLLLLTTTTTTTTTTTTTTHHHHHHHHHHTTTTTTTTTTTTTTLLLLLLLLEEEEEEEEEHHHHHHHHHHSSSSSSDDDDDDDDCCCCCCAAAAAFFFFFFFFFFFMMMMMMMMVVVVVVVDDDDDDDDNNNNNNNNEEEEEEEEEAAAAAIIIIIIIIYYYYYYYYYYYYDDDDDDDDIIIIIIIICCCCCCRRRRRRRRRRRRRRRRRRRRRRNNNNNNNNLLLLLLLLDDDDDDDDIIIIIIIIEEEEEEEEEPPPPPPPPPPPPPPTTTTTTTYYYYYYYYYYYYTTTTTTTNNNNNNNNLLLLLLLLNNNNNNNNRRRRRRRRRRRLLLLLLLLIIIIIIIIGGGGQQQQQQQQQIIIIIIIIVVVVVVVSSSSSSSSSSSSIIIIIIIITTTTTTTAAAAASSSSSSLLLLLLLLRRRRRRRRRRRFFFFFFFFFFFDDDDDDDDGGGGAAAAALLLLLLLLNNNNNNNNVVVVVVVDDDDDDDDLLLLLLLLTTTTTTTEEEEEEEEEFFFFFFFFFFFQQQQQQQQQTTTTTTTNNNNNNNNLLLLLLLLVVVVVVVPPPPPPPYYYYYYYYYYYYPPPPPPPRRRRRRRRRRRIIIIIIIIHHHHHHHHHHFFFFFFFFFFFPPPPPPPLLLLLLLLVVVVVVVTTTTTTTYYYYYYYYYYYYAAAAAPPPPPPPVVVVVVVIIIIIIIISSSSSSAAAAAEEEEEEEEEKKKKKKKKKAAAAAYYYYYYYYYYYYHHHHHHHHHHEEEEEEEEEQQQQQQQQQLLLLLLLLSSSSSSVVVVVVVAAAAAEEEEEEEEEIIIIIIIITTTTTTTNNNNNNNNAAAAACCCCCCFFFFFFFFFFFEEEEEEEEEPPPPPPPAAAAANNNNNNNNQQQQQQQQQMMMMMMMMVVVVVVVKKKKKKKKKCCCCCCDDDDDDDDPPPPPPPRRRRRRRRRRRHHHHHHHHHHGGGGKKKKKKKKKYYYYYYYYYYYYMMMMMMMMAAAAACCCCCCCCCCCCMMMMMMMMLLLLLLLLYYYYYYYYYYYYRRRRRRRRRRRGGGGDDDDDDDDVVVVVVVVVVVVVVPPPPPPPKKKKKKKKKDDDDDDDDVVVVVVVNNNNNNNNAAAAAAAAAAIIIIIIIIAAAAATTTTTTTIIIIIIIIKKKKKKKKKTTTTTTTKKKKKKKKKRRRRRRRRRRRTTTTTTTIIIIIIIIQQQQQQQQQFFFFFFFFFFFVVVVVVVDDDDDDDDWWWWWWWWWWWWWWCCCCCCPPPPPPPTTTTTTTGGGGFFFFFFFFFFFKKKKKKKKKVVVVVVVGGGGIIIIIIIINNNNNNNNYYYYYYYYYYYYQQQQQQQQQPPPPPPPPPPPPPPTTTTTTTVVVVVVVVVVVVVVPPPPPPPGGGGGGGGDDDDDDDDLLLLLLLLAAAAAKKKKKKKKKVVVVVVVQQQQQQQQQRRRRRRRRRRRAAAAAVVVVVVVCCCCCCMMMMMMMMLLLLLLLLSSSSSSNNNNNNNNTTTTTTTTTTTTTTAAAAAIIIIIIIIAAAAAEEEEEEEEEAAAAAWWWWWWWWWWWWWWAAAAARRRRRRRRRRRLLLLLLLLDDDDDDDDHHHHHHHHHHKKKKKKKKKFFFFFFFFFFFDDDDDDDDLLLLLLLLMMMMMMMMYYYYYYYYYYYYAAAAAKKKKKKKKKRRRRRRRRRRRAAAAAFFFFFFFFFFFVVVVVVVHHHHHHHHHHWWWWWWWWWWWWWWYYYYYYYYYYYYVVVVVVVGGGGEEEEEEEEEGGGGMMMMMMMMEEEEEEEEEEEEEEEEEEGGGGEEEEEEEEEFFFFFFFFFFFSSSSSSEEEEEEEEEAAAAARRRRRRRRRRREEEEEEEEEDDDDDDDDLLLLLLLLAAAAAAAAAALLLLLLLLEEEEEEEEEKKKKKKKKKDDDDDDDDYYYYYYYYYYYYEEEEEEEEEEEEEEEEEEVVVVVVVGGGGMMMMMMMMDDDDDDDDSSSSSSAAAAAEEEEEEEEEGGGGEEEEEEEEEGGGGEEEEEEEEEGGGGAAAAAEEEEEEEEEEEEEEEEEEYYYYYYYYYYYYY

SEQ ID NO: 71 - protein, 3467 aa, Schizophyllum commune
MMMMMMMMRRRRRRRRRRREEEEEEEEEVVVVVVVIIIIIIIISSSSSSVVVVVVVHHHHHHHHHHVVVVVVVGGGGQQQQQQQQQAAAAAGGGGVVVVVVVQQQQQQQQQIIIIIIIIGGGGNNNNNNNNAAAAACCCCCCWWWWWWWWWWWWWWEEEEEEEEELLLLLLLLYYYYYYYYYYYYTTTTTTTLLLLLLLLEEEEEEEEEHHHHHHHHHHGGGGLLLLLLLLSSSSSSPPPPPPPDDDDDDDDGGGGRRRRRRRRRRRLLLLLLLLMMMMMMMMDDDDDDDDDDDDDDDDSSSSSSPPPPPPPSSSSSSKKKKKKKKKHHHHHHHHHHDDDDDDDDSSSSSSGGGGSSSSSSTTTTTTTFFFFFFFFFFFFFFFFFFFFFFSSSSSSEEEEEEEEETTTTTTTGGGGQQQQQQQQQGGGGKKKKKKKKKHHHHHHHHHHVVVVVVVPPPPPPPRRRRRRRRRRRRRRRRRRRRRRLLLLLLLLYYYYYYYYYYYYVVVVVVVDDDDDDDDLLLLLLLLEEEEEEEEEPPPPPPPGGGGVVVVVVVIIIIIIIIDDDDDDDDDDDDDDDDVVVVVVVKKKKKKKKKNNNNNNNNGGGGPPPPPPPYYYYYYYYYYYYRRRRRRRRRRRSSSSSSLLLLLLLLFFFFFFFFFFFHHHHHHHHHHPPPPPPPEEEEEEEEETTTTTTTMMMMMMMMIIIIIIIITTTTTTTGGGGKKKKKKKKKEEEEEEEEEDDDDDDDDAAAAAAAAAANNNNNNNNNNNNNNNNYYYYYYYYYYYYAAAAARRRRRRRRRRRGGGGHHHHHHHHHHYYYYYYYYYYYYTTTTTTTVVVVVVVGGGGKKKKKKKKKEEEEEEEEELLLLLLLLIIIIIIIIDDDDDDDDPPPPPPPVVVVVVVMMMMMMMMDDDDDDDDKKKKKKKKKLLLLLLLLRRRRRRRRRRRRRRRRRRRRRRLLLLLLLLAAAAADDDDDDDDNNNNNNNNCCCCCCSSSSSSGGGGRRRRRRRRRRRQQQQQQQQQGGGGLLLLLLLLFFFFFFFFFFFVVVVVVVFFFFFFFFFFFHHHHHHHHHHSSSSSSFFFFFFFFFFFGGGGGGGGGGGGTTTTTTTGGGGSSSSSSGGGGFFFFFFFFFFFGGGGAAAAALLLLLLLLLLLLLLLLLLLLLLLLEEEEEEEEERRRRRRRRRRRLLLLLLLLSSSSSSTTTTTTTDDDDDDDDYYYYYYYYYYYYGGGGKKKKKKKKKKKKKKKKKKAAAAAKKKKKKKKKLLLLLLLLEEEEEEEEEFFFFFFFFFFFCCCCCCVVVVVVVYYYYYYYYYYYYPPPPPPPAAAAAPPPPPPPQQQQQQQQQLLLLLLLLSSSSSSSSSSSSSSSSSSVVVVVVVVVVVVVVEEEEEEEEEPPPPPPPYYYYYYYYYYYYNNNNNNNNSSSSSSLLLLLLLLLLLLLLLLTTTTTTTTTTTTTTHHHHHHHHHHTTTTTTTTTTTTTTLLLLLLLLEEEEEEEEEHHHHHHHHHHSSSSSSDDDDDDDDCCCCCCSSSSSSFFFFFFFFFFFMMMMMMMMVVVVVVVDDDDDDDDNNNNNNNNEEEEEEEEEAAAAAIIIIIIIIYYYYYYYYYYYYDDDDDDDDIIIIIIIICCCCCCKKKKKKKKKKKKKKKKKKNNNNNNNNLLLLLLLLGGGGVVVVVVVAAAAAQQQQQQQQQPPPPPPPGGGGFFFFFFFFFFFTTTTTTTNNNNNNNNLLLLLLLLNNNNNNNNRRRRRRRRRRRLLLLLLLLIIIIIIIIAAAAAQQQQQQQQQVVVVVVVVVVVVVVSSSSSSSSSSSSIIIIIIIITTTTTTTAAAAASSSSSSLLLLLLLLRRRRRRRRRRRFFFFFFFFFFFDDDDDDDDGGGGSSSSSSLLLLLLLLNNNNNNNNVVVVVVVDDDDDDDDLLLLLLLLNNNNNNNNEEEEEEEEEFFFFFFFFFFFQQQQQQQQQTTTTTTTNNNNNNNNLLLLLLLLVVVVVVVPPPPPPPFFFFFFFFFFFPPPPPPPRRRRRRRRRRRIIIIIIIIHHHHHHHHHHFFFFFFFFFFFPPPPPPPLLLLLLLLAAAAASSSSSSYYYYYYYYYYYYAAAAAPPPPPPPLLLLLLLLLLLLLLLLSSSSSSAAAAAPPPPPPPRRRRRRRRRRRRRRRRRRRRRRQQQQQQQQQHHHHHHHHHHEEEEEEEEEQQQQQQQQQNNNNNNNNSSSSSSVVVVVVVEEEEEEEEEEEEEEEEEEMMMMMMMMTTTTTTTFFFFFFFFFFFSSSSSSCCCCCCFFFFFFFFFFFEEEEEEEEESSSSSSGGGGNNNNNNNNQQQQQQQQQMMMMMMMMVVVVVVVKKKKKKKKKCCCCCCDDDDDDDDAAAAAKKKKKKKKKDDDDDDDDGGGGKKKKKKKKKYYYYYYYYYYYYMMMMMMMMAAAAACCCCCCCCCCCCLLLLLLLLLLLLLLLLYYYYYYYYYYYYRRRRRRRRRRRGGGGDDDDDDDDVVVVVVVVVVVVVVPPPPPPPKKKKKKKKKDDDDDDDDTTTTTTTQQQQQQQQQAAAAAAAAAAVVVVVVVAAAAASSSSSSIIIIIIIIKKKKKKKKKTTTTTTTKKKKKKKKKRRRRRRRRRRRTTTTTTTIIIIIIIIQQQQQQQQQFFFFFFFFFFFVVVVVVVDDDDDDDDWWWWWWWWWWWWWWCCCCCCPPPPPPPTTTTTTTGGGGFFFFFFFFFFFKKKKKKKKKLLLLLLLLGGGGVVVVVVVCCCCCCNNNNNNNNEEEEEEEEEAAAAAPPPPPPPAAAAATTTTTTTVVVVVVVPPPPPPPGGGGGGGGDDDDDDDDLLLLLLLLAAAAAKKKKKKKKKVVVVVVVPPPPPPPRRRRRRRRRRRSSSSSSLLLLLLLLCCCCCCMMMMMMMMLLLLLLLLSSSSSSNNNNNNNNTTTTTTTTTTTTTTAAAAAIIIIIIIIAAAAAAAAAAAAAAAWWWWWWWWWWWWWWNNNNNNNNRRRRRRRRRRRLLLLLLLLDDDDDDDDYYYYYYYYYYYYKKKKKKKKKFFFFFFFFFFFDDDDDDDDLLLLLLLLMMMMMMMMYYYYYYYYYYYYRRRRRRRRRRRKKKKKKKKKRRRRRRRRRRRAAAAAFFFFFFFFFFFVVVVVVVHHHHHHHHHHWWWWWWWWWWWWWWYYYYYYYYYYYYVVVVVVVGGGGEEEEEEEEEAAAAAMMMMMMMMEEEEEEEEEEEEEEEEEEGGGGEEEEEEEEEFFFFFFFFFFFSSSSSSEEEEEEEEEAAAAARRRRRRRRRRREEEEEEEEEDDDDDDDDLLLLLLLLAAAAAAAAAALLLLLLLLEEEEEEEEEKKKKKKKKKDDDDDDDDYYYYYYYYYYYYEEEEEEEEEEEEEEEEEEVVVVVVVGGGGTTTTTTTDDDDDDDDSSSSSSAAAAADDDDDDDDAAAAAEEEEEEEEEEEEEEEEEEEEEEEEEEEGGGGEEEEEEEEEYYYYYYYYYYYYY

SEQ ID NO: 72 - protein, 3512 aa, Candida albicans
MMMMMMMMRRRRRRRRRRREEEEEEEEEVVVVVVVIIIIIIIISSSSSSIIIIIIIINNNNNNNNVVVVVVVGGGGQQQQQQQQQAAAAAGGGGCCCCCCQQQQQQQQQIIIIIIIIGGGGNNNNNNNNAAAAACCCCCCWWWWWWWWWWWWWWEEEEEEEEELLLLLLLLYYYYYYYYYYYYSSSSSSQQQQQQQQQEEEEEEEEEHHHHHHHHHHGGGGIIIIIIIIRRRRRRRRRRRPPPPPPPDDDDDDDDGGGGYYYYYYYYYYYYLLLLLLLLQQQQQQQQQEEEEEEEEEGGGGLLLLLLLLDDDDDDDDRRRRRRRRRRRPPPPPPPKKKKKKKKKGGGGGGGGEEEEEEEEEEEEEEEEEEGGGGFFFFFFFFFFFSSSSSSTTTTTTTFFFFFFFFFFFFFFFFFFFFFFSSSSSSEEEEEEEEETTTTTTTGGGGSSSSSSGGGGKKKKKKKKKYYYYYYYYYYYYVVVVVVVPPPPPPPRRRRRRRRRRRAAAAALLLLLLLLYYYYYYYYYYYYVVVVVVVDDDDDDDDLLLLLLLLEEEEEEEEEPPPPPPPNNNNNNNNVVVVVVVIIIIIIIIDDDDDDDDEEEEEEEEEVVVVVVVRRRRRRRRRRRTTTTTTTGGGGVVVVVVVYYYYYYYYYYYYKKKKKKKKKDDDDDDDDLLLLLLLLFFFFFFFFFFFHHHHHHHHHHPPPPPPPEEEEEEEEEQQQQQQQQQLLLLLLLLIIIIIIIIAAAAAGGGGKKKKKKKKKEEEEEEEEEDDDDDDDDAAAAAAAAAANNNNNNNNNNNNNNNNYYYYYYYYYYYYAAAAARRRRRRRRRRRGGGGHHHHHHHHHHYYYYYYYYYYYYTTTTTTTVVVVVVVGGGGRRRRRRRRRRREEEEEEEEEIIIIIIIILLLLLLLLDDDDDDDDDDDDDDDDIIIIIIIILLLLLLLLDDDDDDDDRRRRRRRRRRRVVVVVVVRRRRRRRRRRRRRRRRRRRRRRMMMMMMMMSSSSSSDDDDDDDDQQQQQQQQQCCCCCCDDDDDDDDGGGGLLLLLLLLQQQQQQQQQGGGGFFFFFFFFFFFLLLLLLLLFFFFFFFFFFFTTTTTTTHHHHHHHHHHSSSSSSLLLLLLLLGGGGGGGGGGGGTTTTTTTGGGGSSSSSSGGGGLLLLLLLLGGGGSSSSSSLLLLLLLLLLLLLLLLLLLLLLLLEEEEEEEEEQQQQQQQQQLLLLLLLLSSSSSSLLLLLLLLDDDDDDDDYYYYYYYYYYYYGGGGKKKKKKKKKKKKKKKKKKSSSSSSKKKKKKKKKLLLLLLLLEEEEEEEEEFFFFFFFFFFFAAAAAVVVVVVVYYYYYYYYYYYYPPPPPPPAAAAAPPPPPPPQQQQQQQQQVVVVVVVSSSSSSTTTTTTTSSSSSSVVVVVVVVVVVVVVEEEEEEEEEPPPPPPPYYYYYYYYYYYYNNNNNNNNTTTTTTTVVVVVVVLLLLLLLLTTTTTTTTTTTTTTHHHHHHHHHHTTTTTTTTTTTTTTLLLLLLLLEEEEEEEEEHHHHHHHHHHAAAAADDDDDDDDCCCCCCTTTTTTTFFFFFFFFFFFMMMMMMMMVVVVVVVDDDDDDDDNNNNNNNNEEEEEEEEEAAAAAIIIIIIIIYYYYYYYYYYYYDDDDDDDDMMMMMMMMCCCCCCRRRRRRRRRRRRRRRRRRRRRRNNNNNNNNLLLLLLLLDDDDDDDDIIIIIIIIAAAAARRRRRRRRRRRPPPPPPPNNNNNNNNFFFFFFFFFFFSSSSSSSSSSSSLLLLLLLLNNNNNNNNNNNNNNNNLLLLLLLLIIIIIIIIAAAAAQQQQQQQQQVVVVVVVVVVVVVVSSSSSSSSSSSSVVVVVVVTTTTTTTAAAAASSSSSSLLLLLLLLRRRRRRRRRRRFFFFFFFFFFFDDDDDDDDGGGGSSSSSSLLLLLLLLNNNNNNNNVVVVVVVDDDDDDDDLLLLLLLLNNNNNNNNEEEEEEEEEFFFFFFFFFFFQQQQQQQQQTTTTTTTNNNNNNNNLLLLLLLLVVVVVVVPPPPPPPYYYYYYYYYYYYPPPPPPPRRRRRRRRRRRIIIIIIIIHHHHHHHHHHFFFFFFFFFFFPPPPPPPLLLLLLLLVVVVVVVSSSSSSYYYYYYYYYYYYAAAAAPPPPPPPVVVVVVVFFFFFFFFFFFSSSSSSKKKKKKKKKSSSSSSRRRRRRRRRRRAAAAATTTTTTTHHHHHHHHHHEEEEEEEEEAAAAANNNNNNNNSSSSSSVVVVVVVSSSSSSEEEEEEEEEIIIIIIIITTTTTTTQQQQQQQQQSSSSSSCCCCCCFFFFFFFFFFFEEEEEEEEEPPPPPPPGGGGNNNNNNNNQQQQQQQQQMMMMMMMMVVVVVVVKKKKKKKKKCCCCCCDDDDDDDDPPPPPPPRRRRRRRRRRRTTTTTTTGGGGKKKKKKKKKYYYYYYYYYYYYMMMMMMMMAAAAATTTTTTTCCCCCCLLLLLLLLLLLLLLLLYYYYYYYYYYYYRRRRRRRRRRRGGGGDDDDDDDDVVVVVVVVVVVVVVTTTTTTTRRRRRRRRRRRDDDDDDDDVVVVVVVQQQQQQQQQNNNNNNNNAAAAAVVVVVVVAAAAAQQQQQQQQQVVVVVVVKKKKKKKKKSSSSSSKKKKKKKKKKKKKKKKKKTTTTTTTVVVVVVVQQQQQQQQQLLLLLLLLVVVVVVVDDDDDDDDWWWWWWWWWWWWWWCCCCCCPPPPPPPTTTTTTTGGGGFFFFFFFFFFFKKKKKKKKKIIIIIIIIGGGGIIIIIIIICCCCCCYYYYYYYYYYYYQQQQQQQQQPPPPPPPPPPPPPPTTTTTTTAAAAAIIIIIIIIKKKKKKKKKGGGGSSSSSSEEEEEEEEELLLLLLLLAAAAASSSSSSAAAAASSSSSSRRRRRRRRRRRAAAAAVVVVVVVCCCCCCMMMMMMMMLLLLLLLLSSSSSSNNNNNNNNTTTTTTTTTTTTTTAAAAAIIIIIIIIAAAAAEEEEEEEEEAAAAAWWWWWWWWWWWWWWRRRRRRRRRRRRRRRRRRRRRRIIIIIIIIDDDDDDDDRRRRRRRRRRRKKKKKKKKKFFFFFFFFFFFDDDDDDDDLLLLLLLLMMMMMMMMYYYYYYYYYYYYSSSSSSKKKKKKKKKRRRRRRRRRRRAAAAAFFFFFFFFFFFVVVVVVVHHHHHHHHHHWWWWWWWWWWWWWWYYYYYYYYYYYYVVVVVVVGGGGEEEEEEEEEGGGGMMMMMMMMEEEEEEEEEEEEEEEEEEGGGGEEEEEEEEEFFFFFFFFFFFTTTTTTTEEEEEEEEEAAAAARRRRRRRRRRREEEEEEEEEDDDDDDDDLLLLLLLLAAAAAAAAAALLLLLLLLEEEEEEEEERRRRRRRRRRRDDDDDDDDYYYYYYYYYYYYIIIIIIIIEEEEEEEEEVVVVVVVGGGGTTTTTTTDDDDDDDDSSSSSSFFFFFFFFFFFPPPPPPPEEEEEEEEEEEEEEEEEEEEEEEEEEEEEEEEEEEEEEEEEEEEEYYYYYYYYYYYYY

SEQ ID NO: 73 - protein, 3490 aa, Chlorella vulgaris
MMMMMMMMRRRRRRRRRRREEEEEEEEEVVVVVVVIIIIIIIISSSSSSIIIIIIIIHHHHHHHHHHIIIIIIIIGGGGQQQQQQQQQAAAAAGGGGIIIIIIIIQQQQQQQQQVVVVVVVGGGGNNNNNNNNAAAAACCCCCCWWWWWWWWWWWWWWEEEEEEEEELLLLLLLLYYYYYYYYYYYYCCCCCCLLLLLLLLEEEEEEEEEHHHHHHHHHHGGGGIIIIIIIIQQQQQQQQQPPPPPPPDDDDDDDDGGGGQQQQQQQQQMMMMMMMMPPPPPPPSSSSSSDDDDDDDDKKKKKKKKKTTTTTTTIIIIIIIIGGGGGGGGGGGGDDDDDDDDDDDDDDDDAAAAAFFFFFFFFFFFNNNNNNNNTTTTTTTFFFFFFFFFFFFFFFFFFFFFFSSSSSSEEEEEEEEETTTTTTTGGGGAAAAAGGGGKKKKKKKKKHHHHHHHHHHVVVVVVVPPPPPPPRRRRRRRRRRRCCCCCCVVVVVVVFFFFFFFFFFFLLLLLLLLDDDDDDDDLLLLLLLLEEEEEEEEEPPPPPPPTTTTTTTVVVVVVVIIIIIIIIDDDDDDDDEEEEEEEEEVVVVVVVRRRRRRRRRRRTTTTTTTGGGGTTTTTTTYYYYYYYYYYYYRRRRRRRRRRRQQQQQQQQQLLLLLLLLFFFFFFFFFFFHHHHHHHHHHPPPPPPPEEEEEEEEEQQQQQQQQQLLLLLLLLIIIIIIIISSSSSSGGGGKKKKKKKKKEEEEEEEEEDDDDDDDDAAAAAAAAAANNNNNNNNNNNNNNNNFFFFFFFFFFFAAAAARRRRRRRRRRRGGGGHHHHHHHHHHYYYYYYYYYYYYTTTTTTTIIIIIIIIGGGGKKKKKKKKKEEEEEEEEEIIIIIIIIVVVVVVVDDDDDDDDLLLLLLLLCCCCCCLLLLLLLLDDDDDDDDRRRRRRRRRRRIIIIIIIIRRRRRRRRRRRKKKKKKKKKLLLLLLLLAAAAADDDDDDDDNNNNNNNNCCCCCCTTTTTTTGGGGLLLLLLLLQQQQQQQQQGGGGFFFFFFFFFFFLLLLLLLLVVVVVVVFFFFFFFFFFFNNNNNNNNAAAAAVVVVVVVGGGGGGGGGGGGTTTTTTTGGGGSSSSSSGGGGLLLLLLLLGGGGSSSSSSLLLLLLLLLLLLLLLLLLLLLLLLEEEEEEEEERRRRRRRRRRRLLLLLLLLSSSSSSVVVVVVVDDDDDDDDYYYYYYYYYYYYGGGGKKKKKKKKKKKKKKKKKKSSSSSSKKKKKKKKKLLLLLLLLGGGGFFFFFFFFFFFTTTTTTTVVVVVVVYYYYYYYYYYYYPPPPPPPSSSSSSPPPPPPPQQQQQQQQQVVVVVVVSSSSSSTTTTTTTAAAAAVVVVVVVVVVVVVVEEEEEEEEEPPPPPPPYYYYYYYYYYYYNNNNNNNNSSSSSSVVVVVVVLLLLLLLLSSSSSSTTTTTTTHHHHHHHHHHSSSSSSLLLLLLLLLLLLLLLLEEEEEEEEEHHHHHHHHHHTTTTTTTDDDDDDDDVVVVVVVSSSSSSVVVVVVVMMMMMMMMLLLLLLLLDDDDDDDDNNNNNNNNEEEEEEEEEAAAAAVVVVVVVYYYYYYYYYYYYDDDDDDDDIIIIIIIICCCCCCRRRRRRRRRRRRRRRRRRRRRRSSSSSSLLLLLLLLDDDDDDDDIIIIIIIIEEEEEEEEERRRRRRRRRRRPPPPPPPTTTTTTTYYYYYYYYYYYYTTTTTTTNNNNNNNNLLLLLLLLNNNNNNNNRRRRRRRRRRRLLLLLLLLIIIIIIIIAAAAAQQQQQQQQQVVVVVVVIIIIIIIISSSSSSSSSSSSLLLLLLLLTTTTTTTAAAAASSSSSSLLLLLLLLRRRRRRRRRRRFFFFFFFFFFFDDDDDDDDGGGGAAAAALLLLLLLLNNNNNNNNVVVVVVVDDDDDDDDVVVVVVVTTTTTTTEEEEEEEEEFFFFFFFFFFFQQQQQQQQQTTTTTTTNNNNNNNNLLLLLLLLVVVVVVVPPPPPPPYYYYYYYYYYYYPPPPPPPRRRRRRRRRRRIIIIIIIIHHHHHHHHHHFFFFFFFFFFFMMMMMMMMLLLLLLLLSSSSSSSSSSSSYYYYYYYYYYYYSSSSSSPPPPPPPVVVVVVVIIIIIIIISSSSSSAAAAAEEEEEEEEEKKKKKKKKKAAAAAYYYYYYYYYYYYHHHHHHHHHHEEEEEEEEEQQQQQQQQQLLLLLLLLSSSSSSVVVVVVVAAAAAEEEEEEEEEIIIIIIIITTTTTTTNNNNNNNNSSSSSSAAAAAFFFFFFFFFFFEEEEEEEEEPPPPPPPAAAAASSSSSSMMMMMMMMMMMMMMMMAAAAAKKKKKKKKKCCCCCCDDDDDDDDPPPPPPPRRRRRRRRRRRHHHHHHHHHHGGGGKKKKKKKKKYYYYYYYYYYYYMMMMMMMMAAAAACCCCCCCCCCCCLLLLLLLLMMMMMMMMYYYYYYYYYYYYRRRRRRRRRRRGGGGDDDDDDDDVVVVVVVVVVVVVVPPPPPPPKKKKKKKKKDDDDDDDDVVVVVVVNNNNNNNNAAAAAAAAAAVVVVVVVAAAAATTTTTTTIIIIIIIIKKKKKKKKKTTTTTTTKKKKKKKKKRRRRRRRRRRRTTTTTTTIIIIIIIIQQQQQQQQQFFFFFFFFFFFVVVVVVVDDDDDDDDWWWWWWWWWWWWWWCCCCCCPPPPPPPTTTTTTTGGGGFFFFFFFFFFFKKKKKKKKKCCCCCCGGGGIIIIIIIINNNNNNNNYYYYYYYYYYYYQQQQQQQQQPPPPPPPPPPPPPPTTTTTTTVVVVVVVVVVVVVVPPPPPPPGGGGGGGGDDDDDDDDLLLLLLLLAAAAAKKKKKKKKKVVVVVVVQQQQQQQQQRRRRRRRRRRRAAAAAVVVVVVVCCCCCCMMMMMMMMIIIIIIIISSSSSSNNNNNNNNSSSSSSTTTTTTTAAAAAIIIIIIIIAAAAAEEEEEEEEEVVVVVVVFFFFFFFFFFFSSSSSSRRRRRRRRRRRLLLLLLLLDDDDDDDDHHHHHHHHHHKKKKKKKKKFFFFFFFFFFFDDDDDDDDLLLLLLLLMMMMMMMMYYYYYYYYYYYYAAAAAKKKKKKKKKRRRRRRRRRRRAAAAAFFFFFFFFFFFVVVVVVVHHHHHHHHHHWWWWWWWWWWWWWWYYYYYYYYYYYYVVVVVVVGGGGEEEEEEEEEGGGGMMMMMMMMEEEEEEEEEEEEEEEEEEGGGGEEEEEEEEEFFFFFFFFFFFSSSSSSEEEEEEEEEAAAAARRRRRRRRRRREEEEEEEEEDDDDDDDDLLLLLLLLAAAAAAAAAALLLLLLLLEEEEEEEEEKKKKKKKKKDDDDDDDDYYYYYYYYYYYYEEEEEEEEEEEEEEEEEEVVVVVVVGGGGAAAAAEEEEEEEEESSSSSSAAAAAEEEEEEEEEAAAAADDDDDDDDGGGGEEEEEEEEEDDDDDDDDEEEEEEEEEGGGGEEEEEEEEEEEEEEEEEEYYYYYYYYYYYYY

SEQ ID NO: 74 - protein, 3578 aa, Dictyostelium discoideum
MMMMMMMMGGGGRRRRRRRRRRREEEEEEEEEIIIIIIIIIIIIIIIISSSSSSIIIIIIIIHHHHHHHHHHIIIIIIIIGGGGQQQQQQQQQAAAAAGGGGVVVVVVVQQQQQQQQQVVVVVVVGGGGNNNNNNNNSSSSSSCCCCCCWWWWWWWWWWWWWWEEEEEEEEELLLLLLLLYYYYYYYYYYYYCCCCCCLLLLLLLLEEEEEEEEEHHHHHHHHHHGGGGIIIIIIIIEEEEEEEEERRRRRRRRRRRDDDDDDDDGGGGSSSSSSIIIIIIIIPPPPPPPAAAAADDDDDDDDRRRRRRRRRRRKKKKKKKKKQQQQQQQQQSSSSSSSSSSSSDDDDDDDDVVVVVVVNNNNNNNNNNNNNNNNLLLLLLLLNNNNNNNNKKKKKKKKKDDDDDDDDLLLLLLLLGGGGTTTTTTTFFFFFFFFFFFFFFFFFFFFFFSSSSSSEEEEEEEEESSSSSSTTTTTTTNNNNNNNNGGGGKKKKKKKKKKKKKKKKKKVVVVVVVVVVVVVVPPPPPPPRRRRRRRRRRRAAAAAIIIIIIIIFFFFFFFFFFFLLLLLLLLDDDDDDDDLLLLLLLLEEEEEEEEEPPPPPPPTTTTTTTVVVVVVVIIIIIIIIDDDDDDDDEEEEEEEEEIIIIIIIIRRRRRRRRRRRTTTTTTTGGGGDDDDDDDDYYYYYYYYYYYYKKKKKKKKKNNNNNNNNLLLLLLLLFFFFFFFFFFFHHHHHHHHHHPPPPPPPEEEEEEEEEQQQQQQQQQLLLLLLLLIIIIIIIITTTTTTTGGGGKKKKKKKKKEEEEEEEEEDDDDDDDDAAAAAAAAAANNNNNNNNNNNNNNNNYYYYYYYYYYYYAAAAARRRRRRRRRRRGGGGHHHHHHHHHHYYYYYYYYYYYYTTTTTTTVVVVVVVGGGGKKKKKKKKKEEEEEEEEELLLLLLLLIIIIIIIIDDDDDDDDVVVVVVVCCCCCCVVVVVVVDDDDDDDDRRRRRRRRRRRIIIIIIIIRRRRRRRRRRRRRRRRRRRRRRLLLLLLLLAAAAADDDDDDDDQQQQQQQQQCCCCCCDDDDDDDDGGGGLLLLLLLLQQQQQQQQQGGGGFFFFFFFFFFFLLLLLLLLVVVVVVVFFFFFFFFFFFHHHHHHHHHHSSSSSSVVVVVVVGGGGGGGGGGGGTTTTTTTGGGGSSSSSSGGGGFFFFFFFFFFFGGGGSSSSSSLLLLLLLLLLLLLLLLLLLLLLLLQQQQQQQQQKKKKKKKKKLLLLLLLLAAAAALLLLLLLLDDDDDDDDYYYYYYYYYYYYGGGGGGGGKKKKKKKKKKKKKKKKKKSSSSSSKKKKKKKKKLLLLLLLLDDDDDDDDFFFFFFFFFFFCCCCCCVVVVVVVYYYYYYYYYYYYPPPPPPPSSSSSSPPPPPPPQQQQQQQQQVVVVVVVSSSSSSTTTTTTTSSSSSSVVVVVVVVVVVVVVEEEEEEEEEPPPPPPPYYYYYYYYYYYYNNNNNNNNSSSSSSVVVVVVVLLLLLLLLSSSSSSTTTTTTTHHHHHHHHHHSSSSSSLLLLLLLLLLLLLLLLEEEEEEEEEHHHHHHHHHHTTTTTTTDDDDDDDDVVVVVVVSSSSSSFFFFFFFFFFFMMMMMMMMLLLLLLLLDDDDDDDDNNNNNNNNEEEEEEEEEAAAAAIIIIIIIIYYYYYYYYYYYYNNNNNNNNIIIIIIIICCCCCCKKKKKKKKKNNNNNNNNSSSSSSLLLLLLLLDDDDDDDDIIIIIIIIEEEEEEEEEKKKKKKKKKPPPPPPPTTTTTTTYYYYYYYYYYYYTTTTTTTNNNNNNNNLLLLLLLLNNNNNNNNRRRRRRRRRRRLLLLLLLLIIIIIIIIAAAAAQQQQQQQQQVVVVVVVIIIIIIIISSSSSSSSSSSSLLLLLLLLTTTTTTTSSSSSSSSSSSSLLLLLLLLRRRRRRRRRRRFFFFFFFFFFFPPPPPPPGGGGQQQQQQQQQLLLLLLLLNNNNNNNNLLLLLLLLDDDDDDDDIIIIIIIINNNNNNNNDDDDDDDDIIIIIIIIQQQQQQQQQTTTTTTTNNNNNNNNLLLLLLLLVVVVVVVPPPPPPPFFFFFFFFFFFPPPPPPPRRRRRRRRRRRLLLLLLLLHHHHHHHHHHFFFFFFFFFFFVVVVVVVLLLLLLLLCCCCCCSSSSSSYYYYYYYYYYYYAAAAAPPPPPPPVVVVVVVIIIIIIIISSSSSSRRRRRRRRRRREEEEEEEEEKKKKKKKKKAAAAAHHHHHHHHHHHHHHHHHHHHEEEEEEEEETTTTTTTIIIIIIIITTTTTTTVVVVVVVDDDDDDDDNNNNNNNNIIIIIIIITTTTTTTSSSSSSAAAAAVVVVVVVFFFFFFFFFFFSSSSSSEEEEEEEEEKKKKKKKKKNNNNNNNNIIIIIIIIMMMMMMMMAAAAAKKKKKKKKKCCCCCCQQQQQQQQQPPPPPPPNNNNNNNNLLLLLLLLGGGGKKKKKKKKKYYYYYYYYYYYYMMMMMMMMAAAAACCCCCCCCCCCCLLLLLLLLMMMMMMMMYYYYYYYYYYYYRRRRRRRRRRRGGGGDDDDDDDDIIIIIIIIVVVVVVVPPPPPPPKKKKKKKKKEEEEEEEEEAAAAAQQQQQQQQQKKKKKKKKKAAAAAVVVVVVVQQQQQQQQQNNNNNNNNIIIIIIIIRRRRRRRRRRRSSSSSSEEEEEEEEEKKKKKKKKKSSSSSSRRRRRRRRRRRNNNNNNNNVVVVVVVSSSSSSFFFFFFFFFFFVVVVVVVDDDDDDDDWWWWWWWWWWWWWWSSSSSSPPPPPPPTTTTTTTGGGGFFFFFFFFFFFKKKKKKKKKCCCCCCGGGGIIIIIIIINNNNNNNNNNNNNNNNQQQQQQQQQAAAAAPPPPPPPVVVVVVVSSSSSSTTTTTTTKKKKKKKKKDDDDDDDDSSSSSSEEEEEEEEEMMMMMMMMAAAAAEEEEEEEEEVVVVVVVKKKKKKKKKKKKKKKKKKSSSSSSVVVVVVVCCCCCCMMMMMMMMLLLLLLLLSSSSSSNNNNNNNNTTTTTTTTTTTTTTAAAAAIIIIIIIISSSSSSQQQQQQQQQVVVVVVVFFFFFFFFFFFSSSSSSRRRRRRRRRRRIIIIIIIINNNNNNNNHHHHHHHHHHKKKKKKKKKFFFFFFFFFFFDDDDDDDDLLLLLLLLMMMMMMMMFFFFFFFFFFFVVVVVVVKKKKKKKKKRRRRRRRRRRRAAAAAFFFFFFFFFFFVVVVVVVHHHHHHHHHHWWWWWWWWWWWWWWYYYYYYYYYYYYVVVVVVVGGGGEEEEEEEEEGGGGMMMMMMMMEEEEEEEEEEEEEEEEEEGGGGEEEEEEEEEFFFFFFFFFFFAAAAAEEEEEEEEEAAAAARRRRRRRRRRRDDDDDDDDDDDDDDDDLLLLLLLLLLLLLLLLAAAAALLLLLLLLEEEEEEEEEKKKKKKKKKDDDDDDDDYYYYYYYYYYYYEEEEEEEEESSSSSSVVVVVVVSSSSSSAAAAASSSSSSTTTTTTTEEEEEEEEEGGGGEEEEEEEEEEEEEEEEEEQQQQQQQQQEEEEEEEEEEEEEEEEEEEEEEEEEEEYYYYYYYYYYYYY

SEQ ID NO: 75 - protein, 3501 aa, Physarum polycephalum
MMMMMMMMRRRRRRRRRRREEEEEEEEEVVVVVVVIIIIIIIISSSSSSIIIIIIIIHHHHHHHHHHIIIIIIIIGGGGQQQQQQQQQAAAAAGGGGTTTTTTTQQQQQQQQQVVVVVVVGGGGNNNNNNNNAAAAACCCCCCWWWWWWWWWWWWWWEEEEEEEEELLLLLLLLYYYYYYYYYYYYCCCCCCLLLLLLLLEEEEEEEEEHHHHHHHHHHGGGGIIIIIIIIQQQQQQQQQPPPPPPPDDDDDDDDGGGGQQQQQQQQQMMMMMMMMPPPPPPPSSSSSSDDDDDDDDKKKKKKKKKSSSSSSVVVVVVVGGGGYYYYYYYYYYYYGGGGDDDDDDDDDDDDDDDDAAAAAFFFFFFFFFFFNNNNNNNNTTTTTTTFFFFFFFFFFFFFFFFFFFFFFSSSSSSEEEEEEEEETTTTTTTGGGGAAAAAGGGGKKKKKKKKKHHHHHHHHHHVVVVVVVPPPPPPPRRRRRRRRRRRAAAAAVVVVVVVFFFFFFFFFFFLLLLLLLLDDDDDDDDLLLLLLLLEEEEEEEEEPPPPPPPTTTTTTTVVVVVVVIIIIIIIIDDDDDDDDEEEEEEEEEVVVVVVVRRRRRRRRRRRTTTTTTTGGGGTTTTTTTYYYYYYYYYYYYRRRRRRRRRRRQQQQQQQQQLLLLLLLLFFFFFFFFFFFHHHHHHHHHHPPPPPPPEEEEEEEEEQQQQQQQQQLLLLLLLLIIIIIIIITTTTTTTGGGGKKKKKKKKKEEEEEEEEEDDDDDDDDAAAAAAAAAANNNNNNNNNNNNNNNNYYYYYYYYYYYYAAAAARRRRRRRRRRRGGGGHHHHHHHHHHYYYYYYYYYYYYTTTTTTTIIIIIIIIGGGGKKKKKKKKKEEEEEEEEEIIIIIIIIVVVVVVVDDDDDDDDLLLLLLLLCCCCCCLLLLLLLLDDDDDDDDRRRRRRRRRRRVVVVVVVRRRRRRRRRRRKKKKKKKKKLLLLLLLLAAAAADDDDDDDDQQQQQQQQQCCCCCCTTTTTTTGGGGLLLLLLLLQQQQQQQQQGGGGFFFFFFFFFFFLLLLLLLLVVVVVVVFFFFFFFFFFFHHHHHHHHHHSSSSSSVVVVVVVGGGGGGGGGGGGTTTTTTTGGGGSSSSSSGGGGFFFFFFFFFFFGGGGSSSSSSLLLLLLLLLLLLLLLLLLLLLLLLEEEEEEEEERRRRRRRRRRRLLLLLLLLSSSSSSVVVVVVVDDDDDDDDYYYYYYYYYYYYGGGGKKKKKKKKKKKKKKKKKKSSSSSSKKKKKKKKKLLLLLLLLDDDDDDDDFFFFFFFFFFFCCCCCCVVVVVVVYYYYYYYYYYYYPPPPPPPSSSSSSPPPPPPPQQQQQQQQQVVVVVVVSSSSSSTTTTTTTAAAAAVVVVVVVVVVVVVVEEEEEEEEEPPPPPPPYYYYYYYYYYYYNNNNNNNNSSSSSSVVVVVVVLLLLLLLLSSSSSSTTTTTTTHHHHHHHHHHSSSSSSLLLLLLLLLLLLLLLLEEEEEEEEEHHHHHHHHHHTTTTTTTDDDDDDDDVVVVVVVAAAAAFFFFFFFFFFFMMMMMMMMLLLLLLLLDDDDDDDDNNNNNNNNEEEEEEEEEAAAAAIIIIIIIIYYYYYYYYYYYYDDDDDDDDIIIIIIIICCCCCCKKKKKKKKKRRRRRRRRRRRAAAAALLLLLLLLDDDDDDDDIIIIIIIIDDDDDDDDRRRRRRRRRRRPPPPPPPTTTTTTTYYYYYYYYYYYYTTTTTTTNNNNNNNNLLLLLLLLNNNNNNNNRRRRRRRRRRRLLLLLLLLVVVVVVVAAAAAQQQQQQQQQVVVVVVVIIIIIIIISSSSSSSSSSSSLLLLLLLLTTTTTTTTTTTTTTSSSSSSLLLLLLLLRRRRRRRRRRRFFFFFFFFFFFDDDDDDDDGGGGAAAAALLLLLLLLNNNNNNNNVVVVVVVDDDDDDDDIIIIIIIITTTTTTTEEEEEEEEEFFFFFFFFFFFQQQQQQQQQTTTTTTTNNNNNNNNLLLLLLLLVVVVVVVPPPPPPPYYYYYYYYYYYYPPPPPPPRRRRRRRRRRRIIIIIIIIHHHHHHHHHHFFFFFFFFFFFMMMMMMMMLLLLLLLLCCCCCCSSSSSSYYYYYYYYYYYYAAAAAPPPPPPPVVVVVVVIIIIIIIISSSSSSAAAAAEEEEEEEEEKKKKKKKKKAAAAAYYYYYYYYYYYYHHHHHHHHHHEEEEEEEEEQQQQQQQQQLLLLLLLLTTTTTTTVVVVVVVAAAAAEEEEEEEEEIIIIIIIITTTTTTTNNNNNNNNSSSSSSVVVVVVVFFFFFFFFFFFEEEEEEEEEPPPPPPPAAAAANNNNNNNNMMMMMMMMMMMMMMMMAAAAAKKKKKKKKKCCCCCCDDDDDDDDPPPPPPPRRRRRRRRRRRHHHHHHHHHHGGGGKKKKKKKKKYYYYYYYYYYYYMMMMMMMMAAAAACCCCCCCCCCCCLLLLLLLLMMMMMMMMYYYYYYYYYYYYRRRRRRRRRRRGGGGDDDDDDDDVVVVVVVVVVVVVVPPPPPPPKKKKKKKKKDDDDDDDDVVVVVVVNNNNNNNNAAAAASSSSSSVVVVVVVAAAAAVVVVVVVIIIIIIIIKKKKKKKKKTTTTTTTKKKKKKKKKRRRRRRRRRRRTTTTTTTIIIIIIIIQQQQQQQQQFFFFFFFFFFFVVVVVVVDDDDDDDDWWWWWWWWWWWWWWCCCCCCPPPPPPPTTTTTTTGGGGFFFFFFFFFFFKKKKKKKKKCCCCCCGGGGIIIIIIIINNNNNNNNYYYYYYYYYYYYQQQQQQQQQPPPPPPPPPPPPPPTTTTTTTVVVVVVVVVVVVVVPPPPPPPGGGGGGGGDDDDDDDDLLLLLLLLAAAAAKKKKKKKKKVVVVVVVQQQQQQQQQRRRRRRRRRRRAAAAAVVVVVVVCCCCCCMMMMMMMMLLLLLLLLSSSSSSNNNNNNNNTTTTTTTTTTTTTTAAAAAIIIIIIIIAAAAAEEEEEEEEEVVVVVVVFFFFFFFFFFFSSSSSSRRRRRRRRRRRIIIIIIIIDDDDDDDDHHHHHHHHHHKKKKKKKKKFFFFFFFFFFFDDDDDDDDLLLLLLLLMMMMMMMMYYYYYYYYYYYYAAAAAKKKKKKKKKRRRRRRRRRRRAAAAAFFFFFFFFFFFVVVVVVVHHHHHHHHHHWWWWWWWWWWWWWWYYYYYYYYYYYYVVVVVVVGGGGEEEEEEEEEGGGGMMMMMMMMEEEEEEEEEEEEEEEEEEGGGGEEEEEEEEEFFFFFFFFFFFSSSSSSEEEEEEEEEAAAAARRRRRRRRRRREEEEEEEEEDDDDDDDDLLLLLLLLAAAAAAAAAALLLLLLLLEEEEEEEEEKKKKKKKKKDDDDDDDDYYYYYYYYYYYYEEEEEEEEEEEEEEEEEEVVVVVVVGGGGAAAAAEEEEEEEEESSSSSSSSSSSSEEEEEEEEEAAAAAGGGGGGGGDDDDDDDDEEEEEEEEEEEEEEEEEEGGGGEEEEEEEEEYYYYYYYYYYYYY

SEQ ID NO: 76 - protein, 3485 aa, Physarum polycephalum
MMMMMMMMRRRRRRRRRRREEEEEEEEEIIIIIIIILLLLLLLLSSSSSSIIIIIIIIHHHHHHHHHHIIIIIIIIGGGGQQQQQQQQQAAAAAGGGGAAAAAQQQQQQQQQVVVVVVVGGGGNNNNNNNNAAAAACCCCCCWWWWWWWWWWWWWWEEEEEEEEELLLLLLLLYYYYYYYYYYYYCCCCCCLLLLLLLLEEEEEEEEEHHHHHHHHHHGGGGIIIIIIIIKKKKKKKKKPPPPPPPDDDDDDDDGGGGQQQQQQQQQMMMMMMMMPPPPPPPSSSSSSDDDDDDDDKKKKKKKKKSSSSSSVVVVVVVGGGGGGGGGGGGDDDDDDDDDDDDDDDDAAAAAFFFFFFFFFFFNNNNNNNNTTTTTTTFFFFFFFFFFFFFFFFFFFFFFSSSSSSEEEEEEEEETTTTTTTSSSSSSSSSSSSGGGGKKKKKKKKKHHHHHHHHHHVVVVVVVPPPPPPPRRRRRRRRRRRAAAAAIIIIIIIIFFFFFFFFFFFLLLLLLLLDDDDDDDDLLLLLLLLEEEEEEEEEPPPPPPPTTTTTTTVVVVVVVIIIIIIIIDDDDDDDDEEEEEEEEEIIIIIIIIRRRRRRRRRRRTTTTTTTGGGGTTTTTTTYYYYYYYYYYYYRRRRRRRRRRRQQQQQQQQQLLLLLLLLFFFFFFFFFFFHHHHHHHHHHPPPPPPPEEEEEEEEEQQQQQQQQQLLLLLLLLIIIIIIIITTTTTTTGGGGKKKKKKKKKEEEEEEEEEDDDDDDDDAAAAAAAAAANNNNNNNNNNNNNNNNYYYYYYYYYYYYAAAAARRRRRRRRRRRGGGGHHHHHHHHHHYYYYYYYYYYYYTTTTTTTVVVVVVVGGGGKKKKKKKKKEEEEEEEEELLLLLLLLVVVVVVVDDDDDDDDLLLLLLLLCCCCCCLLLLLLLLDDDDDDDDRRRRRRRRRRRVVVVVVVRRRRRRRRRRRKKKKKKKKKLLLLLLLLAAAAADDDDDDDDQQQQQQQQQCCCCCCSSSSSSGGGGLLLLLLLLQQQQQQQQQGGGGFFFFFFFFFFFLLLLLLLLVVVVVVVFFFFFFFFFFFHHHHHHHHHHSSSSSSVVVVVVVGGGGGGGGGGGGTTTTTTTGGGGSSSSSSGGGGFFFFFFFFFFFGGGGSSSSSSLLLLLLLLLLLLLLLLLLLLLLLLEEEEEEEEERRRRRRRRRRRLLLLLLLLSSSSSSVVVVVVVDDDDDDDDYYYYYYYYYYYYGGGGKKKKKKKKKKKKKKKKKKSSSSSSKKKKKKKKKLLLLLLLLDDDDDDDDFFFFFFFFFFFCCCCCCVVVVVVVYYYYYYYYYYYYPPPPPPPSSSSSSPPPPPPPQQQQQQQQQVVVVVVVSSSSSSTTTTTTTAAAAAVVVVVVVVVVVVVVEEEEEEEEEPPPPPPPYYYYYYYYYYYYNNNNNNNNSSSSSSVVVVVVVLLLLLLLLSSSSSSTTTTTTTHHHHHHHHHHGGGGLLLLLLLLLLLLLLLLEEEEEEEEEHHHHHHHHHHTTTTTTTDDDDDDDDVVVVVVVAAAAAFFFFFFFFFFFMMMMMMMMLLLLLLLLDDDDDDDDNNNNNNNNEEEEEEEEEAAAAAIIIIIIIIYYYYYYYYYYYYDDDDDDDDLLLLLLLLCCCCCCKKKKKKKKKRRRRRRRRRRRSSSSSSLLLLLLLLDDDDDDDDIIIIIIIIEEEEEEEEERRRRRRRRRRRPPPPPPPSSSSSSYYYYYYYYYYYYAAAAANNNNNNNNLLLLLLLLNNNNNNNNRRRRRRRRRRRLLLLLLLLVVVVVVVAAAAAQQQQQQQQQVVVVVVVIIIIIIIISSSSSSSSSSSSLLLLLLLLTTTTTTTTTTTTTTSSSSSSLLLLLLLLRRRRRRRRRRRFFFFFFFFFFFDDDDDDDDGGGGAAAAALLLLLLLLNNNNNNNNVVVVVVVDDDDDDDDIIIIIIIITTTTTTTEEEEEEEEEFFFFFFFFFFFQQQQQQQQQTTTTTTTNNNNNNNNLLLLLLLLVVVVVVVPPPPPPPYYYYYYYYYYYYPPPPPPPRRRRRRRRRRRIIIIIIIIHHHHHHHHHHFFFFFFFFFFFMMMMMMMMLLLLLLLLAAAAASSSSSSYYYYYYYYYYYYAAAAAPPPPPPPVVVVVVVIIIIIIIISSSSSSAAAAAEEEEEEEEEKKKKKKKKKAAAAAFFFFFFFFFFFHHHHHHHHHHEEEEEEEEEQQQQQQQQQLLLLLLLLSSSSSSVVVVVVVAAAAAEEEEEEEEELLLLLLLLTTTTTTTNNNNNNNNTTTTTTTVVVVVVVFFFFFFFFFFFDDDDDDDDPPPPPPPSSSSSSSSSSSSMMMMMMMMMMMMMMMMAAAAAKKKKKKKKKCCCCCCDDDDDDDDPPPPPPPRRRRRRRRRRRHHHHHHHHHHGGGGKKKKKKKKKYYYYYYYYYYYYMMMMMMMMAAAAACCCCCCCCCCCCLLLLLLLLMMMMMMMMYYYYYYYYYYYYRRRRRRRRRRRGGGGDDDDDDDDVVVVVVVVVVVVVVPPPPPPPKKKKKKKKKDDDDDDDDVVVVVVVNNNNNNNNAAAAAAAAAAVVVVVVVAAAAAVVVVVVVIIIIIIIIKKKKKKKKKTTTTTTTKKKKKKKKKRRRRRRRRRRRTTTTTTTIIIIIIIIQQQQQQQQQFFFFFFFFFFFVVVVVVVDDDDDDDDWWWWWWWWWWWWWWCCCCCCPPPPPPPTTTTTTTGGGGFFFFFFFFFFFKKKKKKKKKCCCCCCGGGGIIIIIIIINNNNNNNNYYYYYYYYYYYYQQQQQQQQQPPPPPPPPPPPPPPSSSSSSVVVVVVVVVVVVVVPPPPPPPGGGGGGGGDDDDDDDDLLLLLLLLAAAAAKKKKKKKKKVVVVVVVQQQQQQQQQRRRRRRRRRRRAAAAALLLLLLLLCCCCCCMMMMMMMMIIIIIIIISSSSSSNNNNNNNNTTTTTTTTTTTTTTAAAAAIIIIIIIIAAAAAEEEEEEEEEVVVVVVVFFFFFFFFFFFSSSSSSRRRRRRRRRRRIIIIIIIIDDDDDDDDHHHHHHHHHHKKKKKKKKKFFFFFFFFFFFDDDDDDDDLLLLLLLLMMMMMMMMYYYYYYYYYYYYAAAAAKKKKKKKKKRRRRRRRRRRRAAAAAFFFFFFFFFFFVVVVVVVHHHHHHHHHHWWWWWWWWWWWWWWYYYYYYYYYYYYVVVVVVVGGGGEEEEEEEEEGGGGMMMMMMMMEEEEEEEEEEEEEEEEEEVVVVVVVEEEEEEEEEFFFFFFFFFFFSSSSSSEEEEEEEEEAAAAARRRRRRRRRRREEEEEEEEEDDDDDDDDLLLLLLLLAAAAAAAAAALLLLLLLLEEEEEEEEEKKKKKKKKKDDDDDDDDYYYYYYYYYYYYEEEEEEEEEEEEEEEEEEVVVVVVVGGGGAAAAAEEEEEEEEETTTTTTTAAAAAEEEEEEEEEDDDDDDDDDDDDDDDDGGGGAAAAADDDDDDDDEEEEEEEEEEEEEEEEEEMMMMMMMMM

SEQ ID NO: 77 - protein, 3506 aa, Euglena gracilis
MMMMMMMMRRRRRRRRRRREEEEEEEEEIIIIIIIIIIIIIIIISSSSSSIIIIIIIIHHHHHHHHHHLLLLLLLLGGGGQQQQQQQQQGGGGGGGGIIIIIIIIQQQQQQQQQIIIIIIIIGGGGNNNNNNNNAAAAACCCCCCWWWWWWWWWWWWWWEEEEEEEEELLLLLLLLYYYYYYYYYYYYCCCCCCLLLLLLLLEEEEEEEEEHHHHHHHHHHGGGGIIIIIIIIQQQQQQQQQPPPPPPPDDDDDDDDGGGGSSSSSSMMMMMMMMPPPPPPPSSSSSSDDDDDDDDKKKKKKKKKAAAAAIIIIIIIIGGGGVVVVVVVEEEEEEEEEDDDDDDDDDDDDDDDDAAAAAFFFFFFFFFFFNNNNNNNNTTTTTTTFFFFFFFFFFFFFFFFFFFFFFSSSSSSEEEEEEEEETTTTTTTGGGGAAAAAGGGGKKKKKKKKKHHHHHHHHHHVVVVVVVPPPPPPPRRRRRRRRRRRAAAAAVVVVVVVFFFFFFFFFFFLLLLLLLLDDDDDDDDLLLLLLLLEEEEEEEEEPPPPPPPSSSSSSVVVVVVVVVVVVVVDDDDDDDDEEEEEEEEEVVVVVVVRRRRRRRRRRRTTTTTTTGGGGTTTTTTTYYYYYYYYYYYYRRRRRRRRRRRQQQQQQQQQLLLLLLLLFFFFFFFFFFFHHHHHHHHHHPPPPPPPEEEEEEEEEQQQQQQQQQLLLLLLLLIIIIIIIISSSSSSGGGGKKKKKKKKKEEEEEEEEEDDDDDDDDAAAAAAAAAANNNNNNNNNNNNNNNNYYYYYYYYYYYYAAAAARRRRRRRRRRRGGGGHHHHHHHHHHYYYYYYYYYYYYTTTTTTTIIIIIIIIGGGGKKKKKKKKKEEEEEEEEEIIIIIIIIVVVVVVVDDDDDDDDLLLLLLLLCCCCCCLLLLLLLLDDDDDDDDRRRRRRRRRRRIIIIIIIIRRRRRRRRRRRKKKKKKKKKLLLLLLLLAAAAADDDDDDDDNNNNNNNNCCCCCCTTTTTTTGGGGLLLLLLLLQQQQQQQQQGGGGFFFFFFFFFFFLLLLLLLLAAAAAFFFFFFFFFFFHHHHHHHHHHAAAAAVVVVVVVGGGGGGGGGGGGTTTTTTTGGGGSSSSSSGGGGLLLLLLLLGGGGRRRRRRRRRRRLLLLLLLLLLLLLLLLLLLLLLLLEEEEEEEEERRRRRRRRRRRLLLLLLLLSSSSSSVVVVVVVDDDDDDDDYYYYYYYYYYYYGGGGKKKKKKKKKKKKKKKKKKSSSSSSKKKKKKKKKLLLLLLLLGGGGFFFFFFFFFFFTTTTTTTIIIIIIIIYYYYYYYYYYYYPPPPPPPSSSSSSPPPPPPPQQQQQQQQQIIIIIIIISSSSSSTTTTTTTAAAAAVVVVVVVVVVVVVVEEEEEEEEEPPPPPPPYYYYYYYYYYYYNNNNNNNNSSSSSSVVVVVVVLLLLLLLLSSSSSSTTTTTTTHHHHHHHHHHSSSSSSLLLLLLLLLLLLLLLLEEEEEEEEEHHHHHHHHHHTTTTTTTDDDDDDDDVVVVVVVAAAAAVVVVVVVMMMMMMMMLLLLLLLLDDDDDDDDNNNNNNNNEEEEEEEEEAAAAAIIIIIIIIYYYYYYYYYYYYDDDDDDDDIIIIIIIICCCCCCRRRRRRRRRRRRRRRRRRRRRRNNNNNNNNLLLLLLLLDDDDDDDDIIIIIIIIEEEEEEEEERRRRRRRRRRRPPPPPPPTTTTTTTYYYYYYYYYYYYTTTTTTTNNNNNNNNLLLLLLLLNNNNNNNNRRRRRRRRRRRLLLLLLLLIIIIIIIIAAAAAQQQQQQQQQVVVVVVVIIIIIIIISSSSSSSSSSSSLLLLLLLLTTTTTTTAAAAASSSSSSLLLLLLLLRRRRRRRRRRRFFFFFFFFFFFDDDDDDDDGGGGAAAAALLLLLLLLNNNNNNNNVVVVVVVDDDDDDDDIIIIIIIITTTTTTTEEEEEEEEEFFFFFFFFFFFQQQQQQQQQTTTTTTTNNNNNNNNLLLLLLLLVVVVVVVPPPPPPPYYYYYYYYYYYYPPPPPPPRRRRRRRRRRRIIIIIIIIHHHHHHHHHHFFFFFFFFFFFVVVVVVVLLLLLLLLSSSSSSSSSSSSYYYYYYYYYYYYAAAAAPPPPPPPIIIIIIIIIIIIIIIISSSSSSAAAAAEEEEEEEEEKKKKKKKKKAAAAAYYYYYYYYYYYYHHHHHHHHHHEEEEEEEEEQQQQQQQQQLLLLLLLLSSSSSSVVVVVVVAAAAAEEEEEEEEEIIIIIIIITTTTTTTNNNNNNNNAAAAAAAAAAFFFFFFFFFFFEEEEEEEEEPPPPPPPAAAAASSSSSSMMMMMMMMMMMMMMMMAAAAAKKKKKKKKKCCCCCCDDDDDDDDPPPPPPPRRRRRRRRRRRHHHHHHHHHHGGGGKKKKKKKKKYYYYYYYYYYYYMMMMMMMMAAAAACCCCCCCCCCCCLLLLLLLLMMMMMMMMYYYYYYYYYYYYRRRRRRRRRRRGGGGDDDDDDDDVVVVVVVVVVVVVVPPPPPPPKKKKKKKKKDDDDDDDDVVVVVVVNNNNNNNNAAAAASSSSSSVVVVVVVAAAAATTTTTTTIIIIIIIIKKKKKKKKKTTTTTTTKKKKKKKKKRRRRRRRRRRRTTTTTTTIIIIIIIIQQQQQQQQQFFFFFFFFFFFVVVVVVVDDDDDDDDWWWWWWWWWWWWWWCCCCCCPPPPPPPTTTTTTTGGGGFFFFFFFFFFFKKKKKKKKKCCCCCCGGGGIIIIIIIINNNNNNNNYYYYYYYYYYYYQQQQQQQQQPPPPPPPPPPPPPPTTTTTTTVVVVVVVVVVVVVVPPPPPPPGGGGGGGGDDDDDDDDLLLLLLLLAAAAAKKKKKKKKKVVVVVVVQQQQQQQQQRRRRRRRRRRRAAAAAVVVVVVVCCCCCCMMMMMMMMIIIIIIIISSSSSSNNNNNNNNSSSSSSTTTTTTTAAAAAIIIIIIIIAAAAAEEEEEEEEEVVVVVVVFFFFFFFFFFFAAAAARRRRRRRRRRRIIIIIIIIDDDDDDDDHHHHHHHHHHKKKKKKKKKFFFFFFFFFFFDDDDDDDDLLLLLLLLMMMMMMMMYYYYYYYYYYYYSSSSSSKKKKKKKKKRRRRRRRRRRRAAAAAFFFFFFFFFFFVVVVVVVHHHHHHHHHHWWWWWWWWWWWWWWYYYYYYYYYYYYVVVVVVVGGGGEEEEEEEEEGGGGMMMMMMMMEEEEEEEEEEEEEEEEEEGGGGEEEEEEEEEFFFFFFFFFFFSSSSSSEEEEEEEEEAAAAARRRRRRRRRRREEEEEEEEEDDDDDDDDLLLLLLLLAAAAAAAAAALLLLLLLLEEEEEEEEEKKKKKKKKKDDDDDDDDYYYYYYYYYYYYEEEEEEEEEEEEEEEEEEVVVVVVVGGGGAAAAAEEEEEEEEESSSSSSAAAAADDDDDDDDVVVVVVVEEEEEEEEEGGGGEEEEEEEEEEEEEEEEEEDDDDDDDDVVVVVVVEEEEEEEEEEEEEEEEEEYYYYYYYYYYYYY

SEQ ID NO: 78 - protein, 3480 aa, Euplotes octocarinatus
MMMMMMMMRRRRRRRRRRREEEEEEEEEVVVVVVVIIIIIIIISSSSSSIIIIIIIIHHHHHHHHHHIIIIIIIIGGGGQQQQQQQQQGGGGGGGGIIIIIIIIQQQQQQQQQVVVVVVVGGGGNNNNNNNNAAAAACCCCCCWWWWWWWWWWWWWWDDDDDDDDLLLLLLLLFFFFFFFFFFFCCCCCCLLLLLLLLEEEEEEEEEHHHHHHHHHHGGGGIIIIIIIIQQQQQQQQQPPPPPPPDDDDDDDDGGGGQQQQQQQQQMMMMMMMMPPPPPPPSSSSSSDDDDDDDDKKKKKKKKKTTTTTTTIIIIIIIIGGGGGGGGGGGGDDDDDDDDDDDDDDDDAAAAAFFFFFFFFFFFNNNNNNNNTTTTTTTFFFFFFFFFFFFFFFFFFFFFFSSSSSSEEEEEEEEETTTTTTTGGGGAAAAAGGGGKKKKKKKKKHHHHHHHHHHVVVVVVVPPPPPPPRRRRRRRRRRRAAAAAVVVVVVVFFFFFFFFFFFLLLLLLLLDDDDDDDDLLLLLLLLEEEEEEEEEPPPPPPPTTTTTTTVVVVVVVCCCCCCDDDDDDDDEEEEEEEEEVVVVVVVRRRRRRRRRRRTTTTTTTGGGGTTTTTTTYYYYYYYYYYYYRRRRRRRRRRRQQQQQQQQQLLLLLLLLFFFFFFFFFFFHHHHHHHHHHPPPPPPPEEEEEEEEEQQQQQQQQQLLLLLLLLIIIIIIIISSSSSSGGGGKKKKKKKKKEEEEEEEEEDDDDDDDDAAAAAAAAAANNNNNNNNNNNNNNNNFFFFFFFFFFFAAAAARRRRRRRRRRRGGGGHHHHHHHHHHYYYYYYYYYYYYTTTTTTTIIIIIIIIGGGGKKKKKKKKKEEEEEEEEEIIIIIIIIVVVVVVVDDDDDDDDLLLLLLLLCCCCCCLLLLLLLLDDDDDDDDRRRRRRRRRRRIIIIIIIIRRRRRRRRRRRKKKKKKKKKLLLLLLLLAAAAADDDDDDDDNNNNNNNNCCCCCCTTTTTTTGGGGLLLLLLLLQQQQQQQQQGGGGFFFFFFFFFFFIIIIIIIIGGGGFFFFFFFFFFFHHHHHHHHHHSSSSSSVVVVVVVGGGGGGGGGGGGTTTTTTTGGGGSSSSSSGGGGLLLLLLLLGGGGSSSSSSLLLLLLLLLLLLLLLLLLLLLLLLEEEEEEEEERRRRRRRRRRRLLLLLLLLSSSSSSVVVVVVVDDDDDDDDYYYYYYYYYYYYGGGGKKKKKKKKKKKKKKKKKKSSSSSSKKKKKKKKKLLLLLLLLTTTTTTTFFFFFFFFFFFTTTTTTTIIIIIIIIYYYYYYYYYYYYPPPPPPPSSSSSSPPPPPPPQQQQQQQQQVVVVVVVSSSSSSTTTTTTTAAAAAVVVVVVVVVVVVVVEEEEEEEEEPPPPPPPYYYYYYYYYYYYNNNNNNNNSSSSSSVVVVVVVLLLLLLLLSSSSSSTTTTTTTHHHHHHHHHHSSSSSSLLLLLLLLLLLLLLLLEEEEEEEEEHHHHHHHHHHTTTTTTTDDDDDDDDVVVVVVVAAAAAVVVVVVVMMMMMMMMLLLLLLLLDDDDDDDDNNNNNNNNEEEEEEEEEAAAAAVVVVVVVYYYYYYYYYYYYDDDDDDDDIIIIIIIICCCCCCRRRRRRRRRRRRRRRRRRRRRRNNNNNNNNLLLLLLLLDDDDDDDDIIIIIIIIEEEEEEEEERRRRRRRRRRRPPPPPPPTTTTTTTYYYYYYYYYYYYTTTTTTTNNNNNNNNLLLLLLLLNNNNNNNNRRRRRRRRRRRLLLLLLLLIIIIIIIIAAAAAQQQQQQQQQVVVVVVVIIIIIIIISSSSSSSSSSSSLLLLLLLLTTTTTTTAAAAASSSSSSLLLLLLLLRRRRRRRRRRRFFFFFFFFFFFDDDDDDDDGGGGAAAAALLLLLLLLNNNNNNNNVVVVVVVDDDDDDDDVVVVVVVTTTTTTTEEEEEEEEEFFFFFFFFFFFQQQQQQQQQTTTTTTTNNNNNNNNLLLLLLLLVVVVVVVPPPPPPPYYYYYYYYYYYYPPPPPPPRRRRRRRRRRRIIIIIIIIHHHHHHHHHHFFFFFFFFFFFMMMMMMMMLLLLLLLLSSSSSSSSSSSSYYYYYYYYYYYYAAAAAPPPPPPPVVVVVVVIIIIIIIISSSSSSAAAAAEEEEEEEEEKKKKKKKKKAAAAAYYYYYYYYYYYYHHHHHHHHHHEEEEEEEEEQQQQQQQQQLLLLLLLLSSSSSSVVVVVVVAAAAAEEEEEEEEEIIIIIIIITTTTTTTNNNNNNNNSSSSSSSSSSSSFFFFFFFFFFFEEEEEEEEEPPPPPPPAAAAASSSSSSMMMMMMMMMMMMMMMMAAAAAKKKKKKKKKCCCCCCDDDDDDDDPPPPPPPRRRRRRRRRRRHHHHHHHHHHGGGGKKKKKKKKKYYYYYYYYYYYYMMMMMMMMAAAAACCCCCCCCCCCCMMMMMMMMMMMMMMMMYYYYYYYYYYYYRRRRRRRRRRRGGGGDDDDDDDDVVVVVVVVVVVVVVPPPPPPPKKKKKKKKKDDDDDDDDVVVVVVVNNNNNNNNAAAAAAAAAAVVVVVVVAAAAATTTTTTTIIIIIIIIKKKKKKKKKTTTTTTTKKKKKKKKKRRRRRRRRRRRTTTTTTTIIIIIIIIQQQQQQQQQFFFFFFFFFFFVVVVVVVDDDDDDDDWWWWWWWWWWWWWWSSSSSSPPPPPPPTTTTTTTGGGGFFFFFFFFFFFKKKKKKKKKCCCCCCGGGGIIIIIIIINNNNNNNNYYYYYYYYYYYYQQQQQQQQQPPPPPPPPPPPPPPTTTTTTTVVVVVVVVVVVVVVPPPPPPPGGGGGGGGDDDDDDDDLLLLLLLLAAAAAKKKKKKKKKVVVVVVVMMMMMMMMRRRRRRRRRRRAAAAAVVVVVVVCCCCCCMMMMMMMMIIIIIIIISSSSSSNNNNNNNNSSSSSSTTTTTTTAAAAAIIIIIIIIAAAAAEEEEEEEEEVVVVVVVFFFFFFFFFFFSSSSSSRRRRRRRRRRRIIIIIIIIDDDDDDDDHHHHHHHHHHKKKKKKKKKFFFFFFFFFFFDDDDDDDDLLLLLLLLMMMMMMMMYYYYYYYYYYYYAAAAAKKKKKKKKKRRRRRRRRRRRAAAAAFFFFFFFFFFFVVVVVVVHHHHHHHHHHWWWWWWWWWWWWWWYYYYYYYYYYYYVVVVVVVGGGGEEEEEEEEEGGGGMMMMMMMMEEEEEEEEEEEEEEEEEEGGGGEEEEEEEEEFFFFFFFFFFFSSSSSSEEEEEEEEEAAAAARRRRRRRRRRREEEEEEEEEDDDDDDDDLLLLLLLLAAAAAAAAAALLLLLLLLEEEEEEEEEKKKKKKKKKDDDDDDDDYYYYYYYYYYYYEEEEEEEEEEEEEEEEEEVVVVVVVGGGGIIIIIIIIEEEEEEEEETTTTTTTAAAAAEEEEEEEEEGGGGEEEEEEEEEGGGGEEEEEEEEEEEEEEEEEEEEEEEEEEEGGGGMMMMMMMMEEEEEEEEEE

SEQ ID NO: 79 - protein, 3478 aa, Euplotes vannus
MMMMMMMMRRRRRRRRRRREEEEEEEEEVVVVVVVIIIIIIIISSSSSSVVVVVVVHHHHHHHHHHIIIIIIIIGGGGQQQQQQQQQGGGGGGGGIIIIIIIIQQQQQQQQQVVVVVVVGGGGNNNNNNNNAAAAACCCCCCWWWWWWWWWWWWWWEEEEEEEEELLLLLLLLFFFFFFFFFFFCCCCCCLLLLLLLLEEEEEEEEEHHHHHHHHHHGGGGIIIIIIIIQQQQQQQQQPPPPPPPDDDDDDDDGGGGQQQQQQQQQMMMMMMMMPPPPPPPSSSSSSDDDDDDDDKKKKKKKKKTTTTTTTIIIIIIIIGGGGGGGGGGGGDDDDDDDDDDDDDDDDAAAAAFFFFFFFFFFFNNNNNNNNTTTTTTTFFFFFFFFFFFFFFFFFFFFFFSSSSSSEEEEEEEEETTTTTTTGGGGAAAAAGGGGKKKKKKKKKHHHHHHHHHHVVVVVVVPPPPPPPRRRRRRRRRRRAAAAAVVVVVVVLLLLLLLLVVVVVVVDDDDDDDDLLLLLLLLEEEEEEEEEPPPPPPPTTTTTTTVVVVVVVCCCCCCDDDDDDDDEEEEEEEEEIIIIIIIIRRRRRRRRRRRTTTTTTTGGGGTTTTTTTYYYYYYYYYYYYRRRRRRRRRRRQQQQQQQQQLLLLLLLLFFFFFFFFFFFHHHHHHHHHHPPPPPPPEEEEEEEEEQQQQQQQQQIIIIIIIIIIIIIIIISSSSSSGGGGKKKKKKKKKEEEEEEEEEDDDDDDDDAAAAAAAAAANNNNNNNNNNNNNNNNFFFFFFFFFFFAAAAARRRRRRRRRRRGGGGHHHHHHHHHHYYYYYYYYYYYYTTTTTTTIIIIIIIIGGGGKKKKKKKKKEEEEEEEEEIIIIIIIIVVVVVVVDDDDDDDDLLLLLLLLVVVVVVVLLLLLLLLDDDDDDDDRRRRRRRRRRRIIIIIIIIRRRRRRRRRRRKKKKKKKKKLLLLLLLLAAAAADDDDDDDDNNNNNNNNCCCCCCTTTTTTTGGGGLLLLLLLLQQQQQQQQQGGGGFFFFFFFFFFFIIIIIIIIGGGGFFFFFFFFFFFHHHHHHHHHHSSSSSSVVVVVVVGGGGGGGGGGGGTTTTTTTGGGGSSSSSSGGGGLLLLLLLLGGGGSSSSSSLLLLLLLLLLLLLLLLLLLLLLLLEEEEEEEEERRRRRRRRRRRLLLLLLLLSSSSSSVVVVVVVDDDDDDDDYYYYYYYYYYYYGGGGKKKKKKKKKKKKKKKKKKSSSSSSKKKKKKKKKLLLLLLLLCCCCCCFFFFFFFFFFFTTTTTTTVVVVVVVYYYYYYYYYYYYPPPPPPPSSSSSSPPPPPPPQQQQQQQQQVVVVVVVSSSSSSTTTTTTTAAAAAVVVVVVVVVVVVVVEEEEEEEEEPPPPPPPYYYYYYYYYYYYNNNNNNNNSSSSSSVVVVVVVLLLLLLLLSSSSSSTTTTTTTHHHHHHHHHHSSSSSSLLLLLLLLLLLLLLLLEEEEEEEEEHHHHHHHHHHTTTTTTTDDDDDDDDVVVVVVVAAAAAVVVVVVVMMMMMMMMLLLLLLLLDDDDDDDDNNNNNNNNEEEEEEEEEAAAAAVVVVVVVYYYYYYYYYYYYDDDDDDDDIIIIIIIICCCCCCRRRRRRRRRRRRRRRRRRRRRRNNNNNNNNLLLLLLLLDDDDDDDDIIIIIIIIEEEEEEEEERRRRRRRRRRRPPPPPPPTTTTTTTYYYYYYYYYYYYTTTTTTTNNNNNNNNLLLLLLLLNNNNNNNNRRRRRRRRRRRLLLLLLLLIIIIIIIIAAAAAQQQQQQQQQVVVVVVVIIIIIIIISSSSSSSSSSSSLLLLLLLLTTTTTTTAAAAASSSSSSLLLLLLLLRRRRRRRRRRRFFFFFFFFFFFDDDDDDDDGGGGAAAAALLLLLLLLNNNNNNNNVVVVVVVDDDDDDDDIIIIIIIITTTTTTTEEEEEEEEEFFFFFFFFFFFQQQQQQQQQTTTTTTTNNNNNNNNLLLLLLLLVVVVVVVPPPPPPPYYYYYYYYYYYYPPPPPPPRRRRRRRRRRRIIIIIIIIHHHHHHHHHHFFFFFFFFFFFMMMMMMMMLLLLLLLLSSSSSSSSSSSSYYYYYYYYYYYYGGGGPPPPPPPVVVVVVVIIIIIIIISSSSSSAAAAAEEEEEEEEEKKKKKKKKKAAAAAYYYYYYYYYYYYHHHHHHHHHHEEEEEEEEEQQQQQQQQQLLLLLLLLSSSSSSVVVVVVVAAAAAEEEEEEEEEIIIIIIIITTTTTTTNNNNNNNNSSSSSSSSSSSSFFFFFFFFFFFEEEEEEEEEPPPPPPPAAAAASSSSSSMMMMMMMMMMMMMMMMAAAAAKKKKKKKKKCCCCCCDDDDDDDDPPPPPPPRRRRRRRRRRRHHHHHHHHHHGGGGKKKKKKKKKYYYYYYYYYYYYMMMMMMMMAAAAACCCCCCCCCCCCMMMMMMMMMMMMMMMMFFFFFFFFFFFRRRRRRRRRRRGGGGDDDDDDDDVVVVVVVVVVVVVVPPPPPPPKKKKKKKKKDDDDDDDDVVVVVVVNNNNNNNNAAAAAAAAAAVVVVVVVAAAAATTTTTTTIIIIIIIIKKKKKKKKKTTTTTTTKKKKKKKKKRRRRRRRRRRRTTTTTTTIIIIIIIIQQQQQQQQQFFFFFFFFFFFVVVVVVVDDDDDDDDWWWWWWWWWWWWWWSSSSSSPPPPPPPGGGGFFFFFFFFFFFKKKKKKKKKVVVVVVVGGGGIIIIIIIINNNNNNNNYYYYYYYYYYYYQQQQQQQQQPPPPPPPPPPPPPPTTTTTTTVVVVVVVVVVVVVVPPPPPPPGGGGGGGGDDDDDDDDLLLLLLLLAAAAAKKKKKKKKKVVVVVVVMMMMMMMMRRRRRRRRRRRAAAAAVVVVVVVCCCCCCMMMMMMMMIIIIIIIISSSSSSNNNNNNNNSSSSSSTTTTTTTAAAAAIIIIIIIIAAAAAEEEEEEEEEVVVVVVVFFFFFFFFFFFSSSSSSRRRRRRRRRRRIIIIIIIIDDDDDDDDHHHHHHHHHHKKKKKKKKKFFFFFFFFFFFDDDDDDDDLLLLLLLLMMMMMMMMYYYYYYYYYYYYAAAAAKKKKKKKKKRRRRRRRRRRRAAAAAFFFFFFFFFFFVVVVVVVHHHHHHHHHHWWWWWWWWWWWWWWYYYYYYYYYYYYVVVVVVVGGGGEEEEEEEEEGGGGMMMMMMMMEEEEEEEEEEEEEEEEEEGGGGEEEEEEEEEFFFFFFFFFFFSSSSSSEEEEEEEEEAAAAARRRRRRRRRRREEEEEEEEEDDDDDDDDLLLLLLLLAAAAAAAAAALLLLLLLLEEEEEEEEEKKKKKKKKKDDDDDDDDYYYYYYYYYYYYEEEEEEEEEEEEEEEEEEVVVVVVVGGGGIIIIIIIIEEEEEEEEETTTTTTTAAAAAEEEEEEEEEGGGGEEEEEEEEEGGGGEEEEEEEEEEEEEEEEEEEEEEEEEEEDDDDDDDDMMMMMMMMAAAAAQQQQQQQQQQ

SEQ ID NO: 80 - protein, 3522 aa, Haemonchus contortus
MMMMMMMMRRRRRRRRRRREEEEEEEEEVVVVVVVIIIIIIIISSSSSSIIIIIIIIHHHHHHHHHHIIIIIIIIGGGGQQQQQQQQQAAAAAGGGGVVVVVVVQQQQQQQQQIIIIIIIIGGGGNNNNNNNNAAAAACCCCCCWWWWWWWWWWWWWWEEEEEEEEELLLLLLLLYYYYYYYYYYYYCCCCCCLLLLLLLLEEEEEEEEEHHHHHHHHHHGGGGIIIIIIIIQQQQQQQQQPPPPPPPDDDDDDDDGGGGQQQQQQQQQMMMMMMMMPPPPPPPSSSSSSDDDDDDDDKKKKKKKKKSSSSSSLLLLLLLLGGGGGGGGCCCCCCDDDDDDDDDDDDDDDDSSSSSSFFFFFFFFFFFSSSSSSTTTTTTTFFFFFFFFFFFFFFFFFFFFFFSSSSSSEEEEEEEEETTTTTTTGGGGSSSSSSGGGGRRRRRRRRRRRHHHHHHHHHHVVVVVVVPPPPPPPRRRRRRRRRRRAAAAAVVVVVVVMMMMMMMMIIIIIIIIDDDDDDDDLLLLLLLLEEEEEEEEEPPPPPPPTTTTTTTVVVVVVVIIIIIIIIDDDDDDDDEEEEEEEEEIIIIIIIIRRRRRRRRRRRTTTTTTTGGGGTTTTTTTYYYYYYYYYYYYRRRRRRRRRRRSSSSSSLLLLLLLLFFFFFFFFFFFHHHHHHHHHHPPPPPPPEEEEEEEEEQQQQQQQQQLLLLLLLLIIIIIIIITTTTTTTGGGGKKKKKKKKKEEEEEEEEEDDDDDDDDAAAAAAAAAANNNNNNNNNNNNNNNNYYYYYYYYYYYYAAAAARRRRRRRRRRRGGGGHHHHHHHHHHYYYYYYYYYYYYTTTTTTTIIIIIIIIGGGGKKKKKKKKKEEEEEEEEEIIIIIIIIIIIIIIIIDDDDDDDDLLLLLLLLTTTTTTTLLLLLLLLDDDDDDDDRRRRRRRRRRRIIIIIIIIRRRRRRRRRRRRRRRRRRRRRRLLLLLLLLAAAAADDDDDDDDNNNNNNNNCCCCCCTTTTTTTGGGGLLLLLLLLQQQQQQQQQGGGGFFFFFFFFFFFLLLLLLLLVVVVVVVFFFFFFFFFFFHHHHHHHHHHSSSSSSFFFFFFFFFFFGGGGGGGGGGGGTTTTTTTGGGGSSSSSSGGGGFFFFFFFFFFFTTTTTTTSSSSSSLLLLLLLLLLLLLLLLMMMMMMMMEEEEEEEEERRRRRRRRRRRLLLLLLLLSSSSSSVVVVVVVDDDDDDDDYYYYYYYYYYYYGGGGKKKKKKKKKKKKKKKKKKAAAAAKKKKKKKKKLLLLLLLLEEEEEEEEEFFFFFFFFFFFSSSSSSVVVVVVVYYYYYYYYYYYYPPPPPPPAAAAAPPPPPPPQQQQQQQQQVVVVVVVSSSSSSTTTTTTTAAAAAVVVVVVVVVVVVVVEEEEEEEEEPPPPPPPYYYYYYYYYYYYNNNNNNNNSSSSSSIIIIIIIILLLLLLLLTTTTTTTTTTTTTTHHHHHHHHHHTTTTTTTTTTTTTTLLLLLLLLEEEEEEEEEHHHHHHHHHHSSSSSSDDDDDDDDCCCCCCSSSSSSFFFFFFFFFFFMMMMMMMMVVVVVVVDDDDDDDDNNNNNNNNEEEEEEEEEAAAAAIIIIIIIIYYYYYYYYYYYYDDDDDDDDIIIIIIIICCCCCCRRRRRRRRRRRRRRRRRRRRRRNNNNNNNNLLLLLLLLDDDDDDDDIIIIIIIIEEEEEEEEERRRRRRRRRRRPPPPPPPSSSSSSYYYYYYYYYYYYTTTTTTTNNNNNNNNLLLLLLLLNNNNNNNNRRRRRRRRRRRLLLLLLLLIIIIIIIIGGGGQQQQQQQQQIIIIIIIIVVVVVVVSSSSSSSSSSSSIIIIIIIITTTTTTTAAAAASSSSSSLLLLLLLLRRRRRRRRRRRFFFFFFFFFFFDDDDDDDDGGGGAAAAALLLLLLLLNNNNNNNNVVVVVVVDDDDDDDDLLLLLLLLTTTTTTTEEEEEEEEEFFFFFFFFFFFQQQQQQQQQTTTTTTTNNNNNNNNLLLLLLLLVVVVVVVPPPPPPPYYYYYYYYYYYYPPPPPPPRRRRRRRRRRRIIIIIIIIHHHHHHHHHHFFFFFFFFFFFPPPPPPPLLLLLLLLAAAAATTTTTTTFFFFFFFFFFFSSSSSSPPPPPPPVVVVVVVIIIIIIIISSSSSSAAAAAEEEEEEEEEKKKKKKKKKAAAAAYYYYYYYYYYYYHHHHHHHHHHEEEEEEEEEQQQQQQQQQLLLLLLLLSSSSSSVVVVVVVAAAAAEEEEEEEEEIIIIIIIITTTTTTTNNNNNNNNMMMMMMMMCCCCCCFFFFFFFFFFFEEEEEEEEEPPPPPPPHHHHHHHHHHNNNNNNNNQQQQQQQQQMMMMMMMMVVVVVVVKKKKKKKKKCCCCCCDDDDDDDDPPPPPPPRRRRRRRRRRRHHHHHHHHHHGGGGKKKKKKKKKYYYYYYYYYYYYMMMMMMMMAAAAAVVVVVVVCCCCCCLLLLLLLLLLLLLLLLFFFFFFFFFFFRRRRRRRRRRRGGGGDDDDDDDDVVVVVVVVVVVVVVPPPPPPPKKKKKKKKKDDDDDDDDVVVVVVVNNNNNNNNAAAAAAAAAAIIIIIIIIAAAAATTTTTTTIIIIIIIIKKKKKKKKKTTTTTTTKKKKKKKKKRRRRRRRRRRRSSSSSSIIIIIIIIQQQQQQQQQFFFFFFFFFFFVVVVVVVDDDDDDDDWWWWWWWWWWWWWWCCCCCCPPPPPPPTTTTTTTGGGGFFFFFFFFFFFKKKKKKKKKVVVVVVVGGGGIIIIIIIINNNNNNNNYYYYYYYYYYYYQQQQQQQQQPPPPPPPPPPPPPPTTTTTTTVVVVVVVVVVVVVVPPPPPPPGGGGGGGGDDDDDDDDLLLLLLLLAAAAAKKKKKKKKKVVVVVVVPPPPPPPRRRRRRRRRRRAAAAAVVVVVVVCCCCCCMMMMMMMMLLLLLLLLSSSSSSNNNNNNNNTTTTTTTTTTTTTTAAAAAIIIIIIIIAAAAAEEEEEEEEEAAAAAWWWWWWWWWWWWWWAAAAARRRRRRRRRRRLLLLLLLLDDDDDDDDHHHHHHHHHHKKKKKKKKKFFFFFFFFFFFDDDDDDDDLLLLLLLLMMMMMMMMYYYYYYYYYYYYAAAAAKKKKKKKKKRRRRRRRRRRRAAAAAFFFFFFFFFFFVVVVVVVHHHHHHHHHHWWWWWWWWWWWWWWYYYYYYYYYYYYVVVVVVVGGGGEEEEEEEEEGGGGMMMMMMMMEEEEEEEEEEEEEEEEEEGGGGEEEEEEEEEFFFFFFFFFFFSSSSSSEEEEEEEEEAAAAARRRRRRRRRRREEEEEEEEEDDDDDDDDLLLLLLLLAAAAAAAAAALLLLLLLLEEEEEEEEEKKKKKKKKKDDDDDDDDYYYYYYYYYYYYEEEEEEEEEEEEEEEEEEVVVVVVVGGGGVVVVVVVDDDDDDDDSSSSSSLLLLLLLLEEEEEEEEEDDDDDDDDNNNNNNNNGGGGEEEEEEEEEEEEEEEEEEGGGGDDDDDDDDEEEEEEEEEYYYYYYYYYYYYY

SEQ ID NO: 81 - protein, 188 aa, Leptomonas seymouri
MMMMMMMMRRRRRRRRRRREEEEEEEEEAAAAAIIIIIIIICCCCCCIIIIIIIIHHHHHHHHHHIIIIIIIIGGGGQQQQQQQQQAAAAAGGGGYYYYYYYYYYYYQQQQQQQQQIIIIIIIIGGGGNNNNNNNNAAAAACCCCCCSSSSSSQQQQQQQQQLLLLLLLLFFFFFFFFFFFCCCCCCC

SEQ ID NO: 82 - protein, 1262 aa, Lytechinus pictus
IIIIIIIITTTTTTTNNNNNNNNAAAAACCCCCCFFFFFFFFFFFEEEEEEEEEPPPPPPPAAAAANNNNNNNNQQQQQQQQQMMMMMMMMVVVVVVVKKKKKKKKKCCCCCCDDDDDDDDPPPPPPPRRRRRRRRRRRHHHHHHHHHHGGGGKKKKKKKKKYYYYYYYYYYYYMMMMMMMMAAAAACCCCCCCCCCCCMMMMMMMMLLLLLLLLYYYYYYYYYYYYRRRRRRRRRRRGGGGDDDDDDDDVVVVVVVVVVVVVVPPPPPPPKKKKKKKKKDDDDDDDDVVVVVVVNNNNNNNNAAAAAAAAAAIIIIIIIIAAAAATTTTTTTIIIIIIIIKKKKKKKKKTTTTTTTKKKKKKKKKRRRRRRRRRRRTTTTTTTIIIIIIIIQQQQQQQQQFFFFFFFFFFFVVVVVVVDDDDDDDDWWWWWWWWWWWWWWCCCCCCPPPPPPPTTTTTTTGGGGFFFFFFFFFFFKKKKKKKKKVVVVVVVGGGGIIIIIIIINNNNNNNNYYYYYYYYYYYYQQQQQQQQQPPPPPPPPPPPPPPTTTTTTTVVVVVVVVVVVVVVPPPPPPPGGGGGGGGDDDDDDDDLLLLLLLLAAAAAKKKKKKKKKVVVVVVVQQQQQQQQQRRRRRRRRRRRAAAAAVVVVVVVCCCCCCMMMMMMMMLLLLLLLLSSSSSSNNNNNNNNTTTTTTTTTTTTTTAAAAAIIIIIIIIAAAAAEEEEEEEEEAAAAAWWWWWWWWWWWWWWAAAAARRRRRRRRRRRLLLLLLLLDDDDDDDDHHHHHHHHHHKKKKKKKKKFFFFFFFFFFFDDDDDDDDLLLLLLLLMMMMMMMMYYYYYYYYYYYYAAAAAKKKKKKKKKRRRRRRRRRRRAAAAAFFFFFFFFFFFVVVVVVVHHHHHHHHHHWWWWWWWWWWWWWWYYYYYYYYYYYYVVVVVVVGGGGEEEEEEEEEGGGGMMMMMMMMEEEEEEEEEEEEEEEEEEGGGGEEEEEEEEEFFFFFFFFFFFSSSSSSEEEEEEEEEAAAAARRRRRRRRRRREEEEEEEEEDDDDDDDDLLLLLLLLAAAAAAAAAALLLLLLLLEEEEEEEEEKKKKKKKKKDDDDDDDDYYYYYYYYYYYYEEEEEEEEEEEEEEEEEEVVVVVVVGGGGVVVVVVVDDDDDDDDSSSSSSVVVVVVVEEEEEEEEEGGGGEEEEEEEEEAAAAAEEEEEEEEEEEEEEEEEEEEEEEEEEEGGGGEEEEEEEEEEEEEEEEEEYYYYYYYYYYYYY

SEQ ID NO: 83 - protein, 3512 aa, Mycosphaerella graminicola
MMMMMMMMRRRRRRRRRRREEEEEEEEEVVVVVVVIIIIIIIISSSSSSLLLLLLLLNNNNNNNNVVVVVVVGGGGQQQQQQQQQAAAAAGGGGCCCCCCQQQQQQQQQIIIIIIIIAAAAANNNNNNNNSSSSSSCCCCCCWWWWWWWWWWWWWWEEEEEEEEELLLLLLLLYYYYYYYYYYYYCCCCCCLLLLLLLLEEEEEEEEEHHHHHHHHHHGGGGIIIIIIIIQQQQQQQQQPPPPPPPDDDDDDDDGGGGYYYYYYYYYYYYLLLLLLLLTTTTTTTEEEEEEEEEEEEEEEEEERRRRRRRRRRRKKKKKKKKKAAAAAAAAAAEEEEEEEEEDDDDDDDDDDDDDDDDDDDDDDDDGGGGFFFFFFFFFFFSSSSSSTTTTTTTFFFFFFFFFFFFFFFFFFFFFFSSSSSSEEEEEEEEETTTTTTTGGGGNNNNNNNNGGGGKKKKKKKKKYYYYYYYYYYYYVVVVVVVPPPPPPPRRRRRRRRRRRTTTTTTTIIIIIIIIYYYYYYYYYYYYAAAAADDDDDDDDLLLLLLLLEEEEEEEEEPPPPPPPNNNNNNNNVVVVVVVVVVVVVVDDDDDDDDEEEEEEEEEVVVVVVVRRRRRRRRRRRTTTTTTTGGGGTTTTTTTYYYYYYYYYYYYRRRRRRRRRRRSSSSSSLLLLLLLLFFFFFFFFFFFHHHHHHHHHHPPPPPPPEEEEEEEEELLLLLLLLMMMMMMMMIIIIIIIITTTTTTTGGGGKKKKKKKKKEEEEEEEEEDDDDDDDDAAAAASSSSSSNNNNNNNNNNNNNNNNYYYYYYYYYYYYAAAAARRRRRRRRRRRGGGGHHHHHHHHHHYYYYYYYYYYYYTTTTTTTVVVVVVVGGGGKKKKKKKKKEEEEEEEEELLLLLLLLIIIIIIIIDDDDDDDDQQQQQQQQQVVVVVVVLLLLLLLLDDDDDDDDKKKKKKKKKVVVVVVVRRRRRRRRRRRHHHHHHHHHHVVVVVVVAAAAADDDDDDDDNNNNNNNNCCCCCCSSSSSSGGGGLLLLLLLLQQQQQQQQQGGGGFFFFFFFFFFFLLLLLLLLVVVVVVVFFFFFFFFFFFHHHHHHHHHHSSSSSSFFFFFFFFFFFGGGGGGGGGGGGTTTTTTTGGGGSSSSSSGGGGFFFFFFFFFFFGGGGAAAAALLLLLLLLLLLLLLLLMMMMMMMMEEEEEEEEERRRRRRRRRRRLLLLLLLLSSSSSSVVVVVVVDDDDDDDDYYYYYYYYYYYYGGGGKKKKKKKKKKKKKKKKKKCCCCCCKKKKKKKKKLLLLLLLLEEEEEEEEEFFFFFFFFFFFCCCCCCVVVVVVVYYYYYYYYYYYYPPPPPPPAAAAAPPPPPPPQQQQQQQQQVVVVVVVAAAAATTTTTTTSSSSSSVVVVVVVVVVVVVVEEEEEEEEEPPPPPPPYYYYYYYYYYYYNNNNNNNNSSSSSSIIIIIIIILLLLLLLLTTTTTTTTTTTTTTHHHHHHHHHHTTTTTTTTTTTTTTLLLLLLLLEEEEEEEEEHHHHHHHHHHSSSSSSDDDDDDDDCCCCCCSSSSSSFFFFFFFFFFFMMMMMMMMVVVVVVVDDDDDDDDNNNNNNNNEEEEEEEEEAAAAAIIIIIIIIYYYYYYYYYYYYDDDDDDDDIIIIIIIICCCCCCRRRRRRRRRRRRRRRRRRRRRRNNNNNNNNLLLLLLLLGGGGIIIIIIIIEEEEEEEEERRRRRRRRRRRPPPPPPPNNNNNNNNYYYYYYYYYYYYEEEEEEEEENNNNNNNNLLLLLLLLNNNNNNNNRRRRRRRRRRRLLLLLLLLIIIIIIIIAAAAAQQQQQQQQQVVVVVVVVVVVVVVSSSSSSSSSSSSIIIIIIIITTTTTTTAAAAASSSSSSLLLLLLLLRRRRRRRRRRRFFFFFFFFFFFDDDDDDDDGGGGSSSSSSLLLLLLLLNNNNNNNNVVVVVVVDDDDDDDDLLLLLLLLNNNNNNNNEEEEEEEEEFFFFFFFFFFFQQQQQQQQQTTTTTTTNNNNNNNNLLLLLLLLVVVVVVVPPPPPPPYYYYYYYYYYYYPPPPPPPRRRRRRRRRRRIIIIIIIIHHHHHHHHHHFFFFFFFFFFFPPPPPPPLLLLLLLLVVVVVVVAAAAAYYYYYYYYYYYYAAAAAPPPPPPPIIIIIIIIVVVVVVVSSSSSSAAAAAAAAAAKKKKKKKKKAAAAAAAAAAHHHHHHHHHHEEEEEEEEEAAAAANNNNNNNNSSSSSSVVVVVVVQQQQQQQQQEEEEEEEEEIIIIIIIISSSSSSMMMMMMMMSSSSSSCCCCCCFFFFFFFFFFFEEEEEEEEEPPPPPPPNNNNNNNNSSSSSSQQQQQQQQQMMMMMMMMVVVVVVVKKKKKKKKKCCCCCCDDDDDDDDPPPPPPPRRRRRRRRRRRNNNNNNNNGGGGKKKKKKKKKYYYYYYYYYYYYMMMMMMMMAAAAATTTTTTTCCCCCCLLLLLLLLLLLLLLLLYYYYYYYYYYYYRRRRRRRRRRRGGGGDDDDDDDDVVVVVVVVVVVVVVPPPPPPPKKKKKKKKKDDDDDDDDVVVVVVVHHHHHHHHHHQQQQQQQQQAAAAAVVVVVVVAAAAATTTTTTTLLLLLLLLKKKKKKKKKTTTTTTTKKKKKKKKKRRRRRRRRRRRTTTTTTTIIIIIIIIQQQQQQQQQFFFFFFFFFFFVVVVVVVDDDDDDDDWWWWWWWWWWWWWWCCCCCCPPPPPPPTTTTTTTGGGGFFFFFFFFFFFKKKKKKKKKIIIIIIIIGGGGIIIIIIIICCCCCCYYYYYYYYYYYYQQQQQQQQQPPPPPPPPPPPPPPQQQQQQQQQNNNNNNNNVVVVVVVPPPPPPPNNNNNNNNGGGGDDDDDDDDLLLLLLLLAAAAAKKKKKKKKKVVVVVVVNNNNNNNNRRRRRRRRRRRAAAAAVVVVVVVCCCCCCMMMMMMMMLLLLLLLLSSSSSSNNNNNNNNTTTTTTTTTTTTTTAAAAAIIIIIIIIAAAAAEEEEEEEEEAAAAAWWWWWWWWWWWWWWSSSSSSAAAAALLLLLLLLSSSSSSHHHHHHHHHHKKKKKKKKKFFFFFFFFFFFDDDDDDDDLLLLLLLLMMMMMMMMYYYYYYYYYYYYSSSSSSKKKKKKKKKRRRRRRRRRRRAAAAAFFFFFFFFFFFVVVVVVVHHHHHHHHHHWWWWWWWWWWWWWWYYYYYYYYYYYYVVVVVVVGGGGEEEEEEEEEGGGGMMMMMMMMEEEEEEEEEEEEEEEEEEGGGGEEEEEEEEEFFFFFFFFFFFSSSSSSEEEEEEEEEAAAAARRRRRRRRRRREEEEEEEEEDDDDDDDDLLLLLLLLAAAAAAAAAALLLLLLLLEEEEEEEEERRRRRRRRRRRDDDDDDDDYYYYYYYYYYYYEEEEEEEEEEEEEEEEEEVVVVVVVAAAAAAAAAADDDDDDDDSSSSSSAAAAAEEEEEEEEEGGGGDDDDDDDDEEEEEEEEEGGGGGGGGEEEEEEEEEAAAAAEEEEEEEEEYYYYYYYYYYYYY

SEQ ID NO: 84 - protein, 3500 aa, Naegleria gruberi
MMMMMMMMRRRRRRRRRRREEEEEEEEEVVVVVVVIIIIIIIISSSSSSIIIIIIIIHHHHHHHHHHIIIIIIIIGGGGQQQQQQQQQAAAAAGGGGVVVVVVVQQQQQQQQQVVVVVVVGGGGNNNNNNNNAAAAACCCCCCWWWWWWWWWWWWWWEEEEEEEEELLLLLLLLYYYYYYYYYYYYCCCCCCLLLLLLLLEEEEEEEEEHHHHHHHHHHGGGGIIIIIIIIQQQQQQQQQPPPPPPPDDDDDDDDGGGGLLLLLLLLMMMMMMMMPPPPPPPSSSSSSDDDDDDDDKKKKKKKKKTTTTTTTIIIIIIIIGGGGVVVVVVVEEEEEEEEEDDDDDDDDDDDDDDDDAAAAAFFFFFFFFFFFNNNNNNNNTTTTTTTFFFFFFFFFFFFFFFFFFFFFFSSSSSSEEEEEEEEETTTTTTTGGGGAAAAAGGGGKKKKKKKKKHHHHHHHHHHVVVVVVVPPPPPPPRRRRRRRRRRRAAAAAVVVVVVVFFFFFFFFFFFLLLLLLLLDDDDDDDDLLLLLLLLEEEEEEEEEPPPPPPPTTTTTTTVVVVVVVVVVVVVVDDDDDDDDEEEEEEEEEVVVVVVVRRRRRRRRRRRTTTTTTTGGGGTTTTTTTYYYYYYYYYYYYRRRRRRRRRRRQQQQQQQQQLLLLLLLLFFFFFFFFFFFHHHHHHHHHHPPPPPPPEEEEEEEEEQQQQQQQQQLLLLLLLLIIIIIIIITTTTTTTGGGGKKKKKKKKKEEEEEEEEEDDDDDDDDAAAAAAAAAANNNNNNNNNNNNNNNNYYYYYYYYYYYYAAAAARRRRRRRRRRRGGGGHHHHHHHHHHYYYYYYYYYYYYTTTTTTTIIIIIIIIGGGGKKKKKKKKKEEEEEEEEEIIIIIIIIVVVVVVVDDDDDDDDLLLLLLLLCCCCCCLLLLLLLLDDDDDDDDRRRRRRRRRRRIIIIIIIIRRRRRRRRRRRKKKKKKKKKLLLLLLLLAAAAADDDDDDDDNNNNNNNNCCCCCCTTTTTTTGGGGLLLLLLLLQQQQQQQQQGGGGFFFFFFFFFFFLLLLLLLLVVVVVVVFFFFFFFFFFFSSSSSSSSSSSSVVVVVVVGGGGGGGGGGGGTTTTTTTGGGGSSSSSSGGGGLLLLLLLLGGGGAAAAALLLLLLLLLLLLLLLLLLLLLLLLEEEEEEEEERRRRRRRRRRRLLLLLLLLSSSSSSVVVVVVVDDDDDDDDYYYYYYYYYYYYGGGGKKKKKKKKKKKKKKKKKKSSSSSSKKKKKKKKKLLLLLLLLGGGGFFFFFFFFFFFTTTTTTTVVVVVVVYYYYYYYYYYYYPPPPPPPSSSSSSPPPPPPPQQQQQQQQQVVVVVVVAAAAATTTTTTTAAAAAVVVVVVVVVVVVVVEEEEEEEEEPPPPPPPYYYYYYYYYYYYNNNNNNNNSSSSSSVVVVVVVLLLLLLLLSSSSSSTTTTTTTHHHHHHHHHHAAAAALLLLLLLLLLLLLLLLEEEEEEEEEHHHHHHHHHHTTTTTTTDDDDDDDDVVVVVVVAAAAAVVVVVVVMMMMMMMMLLLLLLLLDDDDDDDDNNNNNNNNEEEEEEEEEAAAAAIIIIIIIIYYYYYYYYYYYYDDDDDDDDIIIIIIIICCCCCCRRRRRRRRRRRRRRRRRRRRRRSSSSSSLLLLLLLLDDDDDDDDIIIIIIIIQQQQQQQQQRRRRRRRRRRRPPPPPPPTTTTTTTYYYYYYYYYYYYTTTTTTTNNNNNNNNLLLLLLLLNNNNNNNNRRRRRRRRRRRLLLLLLLLIIIIIIIIAAAAAQQQQQQQQQVVVVVVVIIIIIIIISSSSSSSSSSSSLLLLLLLLTTTTTTTAAAAASSSSSSLLLLLLLLRRRRRRRRRRRFFFFFFFFFFFDDDDDDDDGGGGAAAAALLLLLLLLNNNNNNNNVVVVVVVDDDDDDDDVVVVVVVTTTTTTTEEEEEEEEEFFFFFFFFFFFQQQQQQQQQTTTTTTTNNNNNNNNLLLLLLLLVVVVVVVPPPPPPPYYYYYYYYYYYYPPPPPPPRRRRRRRRRRRIIIIIIIIHHHHHHHHHHFFFFFFFFFFFMMMMMMMMLLLLLLLLCCCCCCSSSSSSYYYYYYYYYYYYAAAAAPPPPPPPVVVVVVVIIIIIIIISSSSSSAAAAAEEEEEEEEEKKKKKKKKKAAAAAYYYYYYYYYYYYHHHHHHHHHHEEEEEEEEEQQQQQQQQQLLLLLLLLSSSSSSVVVVVVVAAAAAEEEEEEEEEIIIIIIIITTTTTTTNNNNNNNNSSSSSSAAAAAFFFFFFFFFFFEEEEEEEEEPPPPPPPAAAAASSSSSSMMMMMMMMMMMMMMMMAAAAAKKKKKKKKKCCCCCCDDDDDDDDPPPPPPPRRRRRRRRRRRHHHHHHHHHHGGGGKKKKKKKKKYYYYYYYYYYYYMMMMMMMMAAAAACCCCCCCCCCCCLLLLLLLLMMMMMMMMYYYYYYYYYYYYRRRRRRRRRRRGGGGDDDDDDDDVVVVVVVVVVVVVVPPPPPPPKKKKKKKKKDDDDDDDDVVVVVVVNNNNNNNNAAAAAAAAAAVVVVVVVAAAAATTTTTTTIIIIIIIIKKKKKKKKKTTTTTTTKKKKKKKKKRRRRRRRRRRRTTTTTTTIIIIIIIIQQQQQQQQQFFFFFFFFFFFVVVVVVVDDDDDDDDWWWWWWWWWWWWWWSSSSSSPPPPPPPTTTTTTTGGGGFFFFFFFFFFFKKKKKKKKKCCCCCCGGGGIIIIIIIINNNNNNNNYYYYYYYYYYYYQQQQQQQQQPPPPPPPPPPPPPPTTTTTTTVVVVVVVVVVVVVVPPPPPPPGGGGGGGGDDDDDDDDLLLLLLLLAAAAAKKKKKKKKKVVVVVVVQQQQQQQQQRRRRRRRRRRRAAAAAVVVVVVVCCCCCCMMMMMMMMIIIIIIIISSSSSSNNNNNNNNSSSSSSTTTTTTTAAAAAIIIIIIIIAAAAAEEEEEEEEEVVVVVVVFFFFFFFFFFFSSSSSSRRRRRRRRRRRIIIIIIIIDDDDDDDDHHHHHHHHHHKKKKKKKKKFFFFFFFFFFFDDDDDDDDLLLLLLLLMMMMMMMMYYYYYYYYYYYYAAAAAKKKKKKKKKRRRRRRRRRRRAAAAAFFFFFFFFFFFVVVVVVVHHHHHHHHHHWWWWWWWWWWWWWWYYYYYYYYYYYYVVVVVVVGGGGEEEEEEEEEGGGGMMMMMMMMEEEEEEEEEEEEEEEEEEGGGGEEEEEEEEEFFFFFFFFFFFSSSSSSEEEEEEEEEAAAAARRRRRRRRRRREEEEEEEEEDDDDDDDDLLLLLLLLAAAAAAAAAALLLLLLLLEEEEEEEEEKKKKKKKKKDDDDDDDDYYYYYYYYYYYYEEEEEEEEEEEEEEEEEEVVVVVVVGGGGTTTTTTTEEEEEEEEESSSSSSQQQQQQQQQEEEEEEEEEGGGGDDDDDDDDGGGGEEEEEEEEEEEEEEEEEEGGGGEEEEEEEEEDDDDDDDDGGGGGGGGDDDDDDDDQQQQQQQQQQ

SEQ ID NO: 85 - protein, 3519 aa, Notophthalmus viridescens
MMMMMMMMRRRRRRRRRRREEEEEEEEECCCCCCIIIIIIIISSSSSSVVVVVVVHHHHHHHHHHVVVVVVVGGGGQQQQQQQQQAAAAAGGGGVVVVVVVQQQQQQQQQMMMMMMMMGGGGNNNNNNNNAAAAACCCCCCWWWWWWWWWWWWWWEEEEEEEEELLLLLLLLYYYYYYYYYYYYCCCCCCLLLLLLLLEEEEEEEEEHHHHHHHHHHGGGGIIIIIIIIQQQQQQQQQPPPPPPPDDDDDDDDGGGGQQQQQQQQQMMMMMMMMPPPPPPPSSSSSSDDDDDDDDKKKKKKKKKTTTTTTTIIIIIIIIGGGGGGGGGGGGDDDDDDDDDDDDDDDDSSSSSSFFFFFFFFFFFNNNNNNNNTTTTTTTFFFFFFFFFFFFFFFFFFFFFFSSSSSSEEEEEEEEETTTTTTTGGGGAAAAAGGGGKKKKKKKKKHHHHHHHHHHVVVVVVVPPPPPPPRRRRRRRRRRRAAAAAIIIIIIIIFFFFFFFFFFFVVVVVVVDDDDDDDDLLLLLLLLEEEEEEEEEPPPPPPPSSSSSSVVVVVVVIIIIIIIIDDDDDDDDEEEEEEEEEVVVVVVVRRRRRRRRRRRTTTTTTTGGGGTTTTTTTYYYYYYYYYYYYRRRRRRRRRRRQQQQQQQQQLLLLLLLLFFFFFFFFFFFHHHHHHHHHHPPPPPPPEEEEEEEEEQQQQQQQQQLLLLLLLLIIIIIIIISSSSSSGGGGKKKKKKKKKEEEEEEEEEDDDDDDDDAAAAAAAAAANNNNNNNNNNNNNNNNYYYYYYYYYYYYAAAAARRRRRRRRRRRGGGGHHHHHHHHHHYYYYYYYYYYYYTTTTTTTIIIIIIIIGGGGKKKKKKKKKEEEEEEEEEIIIIIIIIIIIIIIIIDDDDDDDDQQQQQQQQQVVVVVVVLLLLLLLLDDDDDDDDRRRRRRRRRRRMMMMMMMMRRRRRRRRRRRKKKKKKKKKLLLLLLLLAAAAADDDDDDDDQQQQQQQQQCCCCCCTTTTTTTGGGGLLLLLLLLQQQQQQQQQGGGGFFFFFFFFFFFLLLLLLLLVVVVVVVFFFFFFFFFFFHHHHHHHHHHSSSSSSFFFFFFFFFFFGGGGGGGGGGGGTTTTTTTGGGGSSSSSSGGGGFFFFFFFFFFFTTTTTTTSSSSSSLLLLLLLLLLLLLLLLMMMMMMMMEEEEEEEEERRRRRRRRRRRLLLLLLLLSSSSSSVVVVVVVDDDDDDDDYYYYYYYYYYYYGGGGKKKKKKKKKKKKKKKKKKSSSSSSKKKKKKKKKLLLLLLLLEEEEEEEEEFFFFFFFFFFFAAAAAIIIIIIIIYYYYYYYYYYYYPPPPPPPAAAAAPPPPPPPQQQQQQQQQVVVVVVVSSSSSSTTTTTTTAAAAAVVVVVVVVVVVVVVEEEEEEEEEPPPPPPPYYYYYYYYYYYYNNNNNNNNSSSSSSIIIIIIIILLLLLLLLTTTTTTTTTTTTTTHHHHHHHHHHTTTTTTTTTTTTTTLLLLLLLLEEEEEEEEEHHHHHHHHHHSSSSSSDDDDDDDDCCCCCCAAAAAFFFFFFFFFFFMMMMMMMMVVVVVVVDDDDDDDDNNNNNNNNEEEEEEEEEAAAAAIIIIIIIIYYYYYYYYYYYYDDDDDDDDIIIIIIIICCCCCCRRRRRRRRRRRRRRRRRRRRRRNNNNNNNNLLLLLLLLDDDDDDDDIIIIIIIIEEEEEEEEERRRRRRRRRRRPPPPPPPSSSSSSYYYYYYYYYYYYTTTTTTTNNNNNNNNLLLLLLLLNNNNNNNNRRRRRRRRRRRLLLLLLLLIIIIIIIISSSSSSQQQQQQQQQIIIIIIIIVVVVVVVSSSSSSSSSSSSIIIIIIIITTTTTTTAAAAASSSSSSLLLLLLLLRRRRRRRRRRRFFFFFFFFFFFDDDDDDDDGGGGAAAAALLLLLLLLNNNNNNNNVVVVVVVDDDDDDDDLLLLLLLLTTTTTTTEEEEEEEEEFFFFFFFFFFFQQQQQQQQQTTTTTTTNNNNNNNNLLLLLLLLVVVVVVVPPPPPPPYYYYYYYYYYYYPPPPPPPRRRRRRRRRRRIIIIIIIIHHHHHHHHHHFFFFFFFFFFFPPPPPPPLLLLLLLLAAAAATTTTTTTYYYYYYYYYYYYAAAAAPPPPPPPVVVVVVVIIIIIIIISSSSSSAAAAAEEEEEEEEEKKKKKKKKKAAAAAYYYYYYYYYYYYHHHHHHHHHHEEEEEEEEEQQQQQQQQQLLLLLLLLSSSSSSVVVVVVVAAAAAEEEEEEEEEIIIIIIIITTTTTTTNNNNNNNNAAAAACCCCCCFFFFFFFFFFFEEEEEEEEEPPPPPPPAAAAANNNNNNNNQQQQQQQQQMMMMMMMMVVVVVVVKKKKKKKKKCCCCCCDDDDDDDDPPPPPPPRRRRRRRRRRRHHHHHHHHHHGGGGKKKKKKKKKYYYYYYYYYYYYMMMMMMMMAAAAACCCCCCCCCCCCLLLLLLLLLLLLLLLLYYYYYYYYYYYYRRRRRRRRRRRGGGGDDDDDDDDVVVVVVVVVVVVVVPPPPPPPKKKKKKKKKDDDDDDDDVVVVVVVNNNNNNNNAAAAAAAAAAIIIIIIIIAAAAAAAAAAIIIIIIIIKKKKKKKKKTTTTTTTKKKKKKKKKRRRRRRRRRRRSSSSSSIIIIIIIIQQQQQQQQQFFFFFFFFFFFVVVVVVVDDDDDDDDWWWWWWWWWWWWWWCCCCCCPPPPPPPTTTTTTTGGGGFFFFFFFFFFFKKKKKKKKKVVVVVVVGGGGIIIIIIIINNNNNNNNYYYYYYYYYYYYQQQQQQQQQPPPPPPPPPPPPPPTTTTTTTAAAAAVVVVVVVPPPPPPPGGGGGGGGDDDDDDDDLLLLLLLLAAAAAKKKKKKKKKVVVVVVVQQQQQQQQQRRRRRRRRRRRAAAAAVVVVVVVCCCCCCMMMMMMMMLLLLLLLLSSSSSSNNNNNNNNTTTTTTTTTTTTTTAAAAAIIIIIIIIAAAAAEEEEEEEEEAAAAAWWWWWWWWWWWWWWAAAAARRRRRRRRRRRLLLLLLLLDDDDDDDDHHHHHHHHHHKKKKKKKKKFFFFFFFFFFFDDDDDDDDLLLLLLLLMMMMMMMMYYYYYYYYYYYYAAAAAKKKKKKKKKRRRRRRRRRRRAAAAAFFFFFFFFFFFVVVVVVVHHHHHHHHHHWWWWWWWWWWWWWWYYYYYYYYYYYYVVVVVVVGGGGEEEEEEEEEGGGGMMMMMMMMEEEEEEEEEEEEEEEEEEGGGGEEEEEEEEEFFFFFFFFFFFSSSSSSEEEEEEEEEAAAAARRRRRRRRRRREEEEEEEEEDDDDDDDDMMMMMMMMAAAAAAAAAALLLLLLLLEEEEEEEEEKKKKKKKKKDDDDDDDDYYYYYYYYYYYYEEEEEEEEEEEEEEEEEEVVVVVVVGGGGLLLLLLLLDDDDDDDDSSSSSSYYYYYYYYYYYYEEEEEEEEEGGGGEEEEEEEEEEEEEEEEEEDDDDDDDDEEEEEEEEEGGGGEEEEEEEEEEEEEEEEEEYYYYYYYYYYYYY

SEQ ID NO: 86 - protein, 3481 aa, Physarum polycephalum
MMMMMMMMRRRRRRRRRRREEEEEEEEEIIIIIIIIIIIIIIIISSSSSSIIIIIIIIHHHHHHHHHHIIIIIIIIGGGGQQQQQQQQQAAAAAGGGGAAAAAQQQQQQQQQVVVVVVVGGGGNNNNNNNNAAAAACCCCCCWWWWWWWWWWWWWWEEEEEEEEELLLLLLLLYYYYYYYYYYYYCCCCCCLLLLLLLLEEEEEEEEEHHHHHHHHHHGGGGIIIIIIIINNNNNNNNPPPPPPPDDDDDDDDGGGGQQQQQQQQQMMMMMMMMPPPPPPPSSSSSSDDDDDDDDKKKKKKKKKSSSSSSVVVVVVVGGGGGGGGGGGGDDDDDDDDDDDDDDDDAAAAAFFFFFFFFFFFNNNNNNNNTTTTTTTFFFFFFFFFFFFFFFFFFFFFFSSSSSSEEEEEEEEETTTTTTTSSSSSSSSSSSSGGGGKKKKKKKKKHHHHHHHHHHVVVVVVVPPPPPPPRRRRRRRRRRRAAAAAIIIIIIIIYYYYYYYYYYYYLLLLLLLLDDDDDDDDLLLLLLLLEEEEEEEEEPPPPPPPTTTTTTTVVVVVVVIIIIIIIIDDDDDDDDEEEEEEEEEIIIIIIIIRRRRRRRRRRRTTTTTTTGGGGTTTTTTTYYYYYYYYYYYYRRRRRRRRRRRQQQQQQQQQLLLLLLLLFFFFFFFFFFFHHHHHHHHHHPPPPPPPEEEEEEEEEQQQQQQQQQLLLLLLLLIIIIIIIITTTTTTTGGGGKKKKKKKKKEEEEEEEEEDDDDDDDDAAAAAAAAAANNNNNNNNNNNNNNNNYYYYYYYYYYYYAAAAARRRRRRRRRRRGGGGHHHHHHHHHHYYYYYYYYYYYYTTTTTTTVVVVVVVGGGGKKKKKKKKKEEEEEEEEEIIIIIIIIVVVVVVVDDDDDDDDLLLLLLLLCCCCCCLLLLLLLLDDDDDDDDRRRRRRRRRRRVVVVVVVRRRRRRRRRRRKKKKKKKKKLLLLLLLLAAAAADDDDDDDDQQQQQQQQQCCCCCCSSSSSSGGGGLLLLLLLLQQQQQQQQQGGGGFFFFFFFFFFFLLLLLLLLVVVVVVVFFFFFFFFFFFHHHHHHHHHHSSSSSSVVVVVVVGGGGGGGGGGGGTTTTTTTGGGGSSSSSSGGGGFFFFFFFFFFFGGGGSSSSSSLLLLLLLLLLLLLLLLLLLLLLLLEEEEEEEEERRRRRRRRRRRLLLLLLLLSSSSSSVVVVVVVDDDDDDDDYYYYYYYYYYYYGGGGKKKKKKKKKKKKKKKKKKSSSSSSKKKKKKKKKLLLLLLLLDDDDDDDDFFFFFFFFFFFCCCCCCVVVVVVVYYYYYYYYYYYYPPPPPPPSSSSSSPPPPPPPQQQQQQQQQVVVVVVVSSSSSSTTTTTTTAAAAAVVVVVVVVVVVVVVEEEEEEEEEPPPPPPPYYYYYYYYYYYYNNNNNNNNSSSSSSVVVVVVVLLLLLLLLSSSSSSTTTTTTTHHHHHHHHHHGGGGLLLLLLLLLLLLLLLLEEEEEEEEEHHHHHHHHHHTTTTTTTDDDDDDDDVVVVVVVAAAAAFFFFFFFFFFFMMMMMMMMLLLLLLLLDDDDDDDDNNNNNNNNEEEEEEEEEAAAAAIIIIIIIIYYYYYYYYYYYYDDDDDDDDLLLLLLLLCCCCCCKKKKKKKKKKKKKKKKKKSSSSSSLLLLLLLLDDDDDDDDIIIIIIIIDDDDDDDDRRRRRRRRRRRPPPPPPPSSSSSSYYYYYYYYYYYYAAAAANNNNNNNNLLLLLLLLNNNNNNNNRRRRRRRRRRRLLLLLLLLVVVVVVVAAAAAQQQQQQQQQVVVVVVVIIIIIIIISSSSSSSSSSSSLLLLLLLLTTTTTTTTTTTTTTSSSSSSLLLLLLLLRRRRRRRRRRRFFFFFFFFFFFDDDDDDDDGGGGAAAAALLLLLLLLNNNNNNNNVVVVVVVDDDDDDDDIIIIIIIINNNNNNNNEEEEEEEEEFFFFFFFFFFFQQQQQQQQQTTTTTTTNNNNNNNNLLLLLLLLVVVVVVVPPPPPPPYYYYYYYYYYYYPPPPPPPRRRRRRRRRRRIIIIIIIIHHHHHHHHHHFFFFFFFFFFFMMMMMMMMLLLLLLLLAAAAASSSSSSYYYYYYYYYYYYAAAAAPPPPPPPVVVVVVVIIIIIIIISSSSSSAAAAAEEEEEEEEEKKKKKKKKKAAAAAFFFFFFFFFFFHHHHHHHHHHEEEEEEEEEQQQQQQQQQLLLLLLLLSSSSSSVVVVVVVAAAAAEEEEEEEEELLLLLLLLTTTTTTTNNNNNNNNTTTTTTTVVVVVVVFFFFFFFFFFFEEEEEEEEEPPPPPPPSSSSSSSSSSSSMMMMMMMMMMMMMMMMAAAAAKKKKKKKKKCCCCCCDDDDDDDDPPPPPPPRRRRRRRRRRRHHHHHHHHHHGGGGKKKKKKKKKYYYYYYYYYYYYMMMMMMMMAAAAACCCCCCCCCCCCLLLLLLLLMMMMMMMMYYYYYYYYYYYYRRRRRRRRRRRGGGGDDDDDDDDVVVVVVVVVVVVVVPPPPPPPKKKKKKKKKDDDDDDDDVVVVVVVTTTTTTTAAAAAAAAAAVVVVVVVAAAAAVVVVVVVIIIIIIIIKKKKKKKKKTTTTTTTKKKKKKKKKRRRRRRRRRRRTTTTTTTIIIIIIIIQQQQQQQQQFFFFFFFFFFFVVVVVVVDDDDDDDDWWWWWWWWWWWWWWCCCCCCPPPPPPPTTTTTTTGGGGFFFFFFFFFFFKKKKKKKKKCCCCCCGGGGIIIIIIIINNNNNNNNYYYYYYYYYYYYQQQQQQQQQAAAAAPPPPPPPSSSSSSVVVVVVVVVVVVVVPPPPPPPGGGGGGGGDDDDDDDDLLLLLLLLAAAAAKKKKKKKKKVVVVVVVQQQQQQQQQRRRRRRRRRRRAAAAALLLLLLLLCCCCCCMMMMMMMMIIIIIIIISSSSSSNNNNNNNNTTTTTTTTTTTTTTAAAAAIIIIIIIIAAAAAEEEEEEEEEVVVVVVVFFFFFFFFFFFSSSSSSRRRRRRRRRRRIIIIIIIIDDDDDDDDHHHHHHHHHHKKKKKKKKKFFFFFFFFFFFDDDDDDDDLLLLLLLLMMMMMMMMYYYYYYYYYYYYAAAAAKKKKKKKKKRRRRRRRRRRRAAAAAFFFFFFFFFFFVVVVVVVHHHHHHHHHHWWWWWWWWWWWWWWYYYYYYYYYYYYVVVVVVVGGGGEEEEEEEEEGGGGMMMMMMMMEEEEEEEEEEEEEEEEEEGGGGEEEEEEEEEFFFFFFFFFFFSSSSSSEEEEEEEEEAAAAARRRRRRRRRRREEEEEEEEEDDDDDDDDLLLLLLLLAAAAAAAAAALLLLLLLLEEEEEEEEEKKKKKKKKKDDDDDDDDYYYYYYYYYYYYEEEEEEEEEEEEEEEEEEVVVVVVVGGGGAAAAAEEEEEEEEETTTTTTTVVVVVVVGGGGDDDDDDDDDDDDDDDDEEEEEEEEEAAAAAEEEEEEEEEEEEEEEEEEEEEEEEEEEMMMMMMMMM

SEQ ID NO: 87 - protein, 3529 aa, Octopus dofleini
MMMMMMMMRRRRRRRRRRREEEEEEEEECCCCCCIIIIIIIISSSSSSIIIIIIIIHHHHHHHHHHVVVVVVVGGGGQQQQQQQQQAAAAAGGGGVVVVVVVQQQQQQQQQIIIIIIIIGGGGNNNNNNNNAAAAACCCCCCWWWWWWWWWWWWWWEEEEEEEEELLLLLLLLYYYYYYYYYYYYCCCCCCLLLLLLLLEEEEEEEEEHHHHHHHHHHGGGGIIIIIIIIQQQQQQQQQPPPPPPPSSSSSSGGGGQQQQQQQQQMMMMMMMMPPPPPPPSSSSSSDDDDDDDDKKKKKKKKKAAAAAVVVVVVVGGGGGGGGKKKKKKKKKDDDDDDDDDDDDDDDDSSSSSSFFFFFFFFFFFNNNNNNNNTTTTTTTFFFFFFFFFFFFFFFFFFFFFFSSSSSSEEEEEEEEETTTTTTTGGGGSSSSSSGGGGKKKKKKKKKHHHHHHHHHHVVVVVVVPPPPPPPRRRRRRRRRRRAAAAAVVVVVVVFFFFFFFFFFFVVVVVVVDDDDDDDDLLLLLLLLEEEEEEEEEPPPPPPPTTTTTTTVVVVVVVVVVVVVVDDDDDDDDEEEEEEEEEIIIIIIIIRRRRRRRRRRRTTTTTTTGGGGLLLLLLLLYYYYYYYYYYYYRRRRRRRRRRRQQQQQQQQQLLLLLLLLFFFFFFFFFFFHHHHHHHHHHPPPPPPPEEEEEEEEEQQQQQQQQQLLLLLLLLIIIIIIIITTTTTTTGGGGKKKKKKKKKEEEEEEEEEDDDDDDDDAAAAAAAAAANNNNNNNNNNNNNNNNYYYYYYYYYYYYAAAAARRRRRRRRRRRGGGGHHHHHHHHHHYYYYYYYYYYYYTTTTTTTIIIIIIIIGGGGKKKKKKKKKEEEEEEEEEHHHHHHHHHHIIIIIIIIDDDDDDDDLLLLLLLLVVVVVVVLLLLLLLLDDDDDDDDRRRRRRRRRRRVVVVVVVRRRRRRRRRRRKKKKKKKKKLLLLLLLLSSSSSSDDDDDDDDQQQQQQQQQCCCCCCTTTTTTTGGGGLLLLLLLLQQQQQQQQQGGGGFFFFFFFFFFFLLLLLLLLIIIIIIIIFFFFFFFFFFFHHHHHHHHHHSSSSSSFFFFFFFFFFFGGGGGGGGGGGGTTTTTTTGGGGSSSSSSGGGGFFFFFFFFFFFTTTTTTTSSSSSSLLLLLLLLLLLLLLLLMMMMMMMMEEEEEEEEERRRRRRRRRRRLLLLLLLLSSSSSSVVVVVVVDDDDDDDDYYYYYYYYYYYYGGGGKKKKKKKKKKKKKKKKKKSSSSSSKKKKKKKKKLLLLLLLLEEEEEEEEEFFFFFFFFFFFSSSSSSIIIIIIIIYYYYYYYYYYYYPPPPPPPAAAAAPPPPPPPQQQQQQQQQVVVVVVVAAAAATTTTTTTAAAAAVVVVVVVVVVVVVVEEEEEEEEEPPPPPPPYYYYYYYYYYYYNNNNNNNNSSSSSSIIIIIIIILLLLLLLLTTTTTTTTTTTTTTHHHHHHHHHHTTTTTTTTTTTTTTLLLLLLLLEEEEEEEEEHHHHHHHHHHSSSSSSDDDDDDDDCCCCCCAAAAAFFFFFFFFFFFMMMMMMMMVVVVVVVDDDDDDDDNNNNNNNNEEEEEEEEEAAAAAIIIIIIIIYYYYYYYYYYYYDDDDDDDDIIIIIIIICCCCCCKKKKKKKKKRRRRRRRRRRRNNNNNNNNLLLLLLLLDDDDDDDDIIIIIIIIEEEEEEEEERRRRRRRRRRRPPPPPPPSSSSSSYYYYYYYYYYYYTTTTTTTNNNNNNNNLLLLLLLLNNNNNNNNRRRRRRRRRRRLLLLLLLLIIIIIIIISSSSSSQQQQQQQQQVVVVVVVVVVVVVVSSSSSSSSSSSSIIIIIIIITTTTTTTAAAAASSSSSSLLLLLLLLRRRRRRRRRRRFFFFFFFFFFFDDDDDDDDGGGGAAAAALLLLLLLLNNNNNNNNVVVVVVVDDDDDDDDLLLLLLLLTTTTTTTEEEEEEEEEFFFFFFFFFFFQQQQQQQQQTTTTTTTNNNNNNNNLLLLLLLLVVVVVVVPPPPPPPYYYYYYYYYYYYPPPPPPPRRRRRRRRRRRIIIIIIIIHHHHHHHHHHFFFFFFFFFFFPPPPPPPLLLLLLLLVVVVVVVTTTTTTTYYYYYYYYYYYYAAAAAPPPPPPPIIIIIIIIIIIIIIIISSSSSSAAAAAEEEEEEEEEKKKKKKKKKAAAAAYYYYYYYYYYYYHHHHHHHHHHEEEEEEEEEQQQQQQQQQLLLLLLLLAAAAAVVVVVVVAAAAAEEEEEEEEEVVVVVVVTTTTTTTSSSSSSAAAAACCCCCCFFFFFFFFFFFEEEEEEEEEPPPPPPPAAAAANNNNNNNNQQQQQQQQQMMMMMMMMVVVVVVVKKKKKKKKKCCCCCCDDDDDDDDPPPPPPPRRRRRRRRRRRHHHHHHHHHHGGGGKKKKKKKKKYYYYYYYYYYYYMMMMMMMMAAAAACCCCCCCCCCCCMMMMMMMMLLLLLLLLYYYYYYYYYYYYRRRRRRRRRRRGGGGDDDDDDDDVVVVVVVVVVVVVVPPPPPPPKKKKKKKKKDDDDDDDDVVVVVVVNNNNNNNNAAAAAAAAAAIIIIIIIIAAAAATTTTTTTIIIIIIIIKKKKKKKKKTTTTTTTKKKKKKKKKRRRRRRRRRRRSSSSSSIIIIIIIIQQQQQQQQQFFFFFFFFFFFVVVVVVVDDDDDDDDWWWWWWWWWWWWWWCCCCCCPPPPPPPTTTTTTTGGGGFFFFFFFFFFFKKKKKKKKKVVVVVVVGGGGIIIIIIIINNNNNNNNYYYYYYYYYYYYQQQQQQQQQPPPPPPPPPPPPPPTTTTTTTVVVVVVVVVVVVVVPPPPPPPGGGGGGGGDDDDDDDDLLLLLLLLAAAAAKKKKKKKKKVVVVVVVQQQQQQQQQRRRRRRRRRRRAAAAAVVVVVVVCCCCCCMMMMMMMMLLLLLLLLSSSSSSNNNNNNNNTTTTTTTTTTTTTTAAAAAVVVVVVVAAAAAEEEEEEEEEAAAAAWWWWWWWWWWWWWWAAAAARRRRRRRRRRRLLLLLLLLDDDDDDDDHHHHHHHHHHKKKKKKKKKFFFFFFFFFFFDDDDDDDDLLLLLLLLMMMMMMMMYYYYYYYYYYYYAAAAAKKKKKKKKKRRRRRRRRRRRAAAAAFFFFFFFFFFFVVVVVVVHHHHHHHHHHWWWWWWWWWWWWWWYYYYYYYYYYYYVVVVVVVGGGGEEEEEEEEEGGGGMMMMMMMMEEEEEEEEEEEEEEEEEEGGGGEEEEEEEEEFFFFFFFFFFFSSSSSSEEEEEEEEEAAAAARRRRRRRRRRREEEEEEEEEDDDDDDDDLLLLLLLLAAAAAAAAAALLLLLLLLEEEEEEEEEKKKKKKKKKDDDDDDDDYYYYYYYYYYYYEEEEEEEEEEEEEEEEEEVVVVVVVGGGGLLLLLLLLDDDDDDDDTTTTTTTFFFFFFFFFFFEEEEEEEEEAAAAAEEEEEEEEEEEEEEEEEEEEEEEEEEEEEEEEEEEEGGGGGGGGDDDDDDDDEEEEEEEEEYYYYYYYYYYYYY

SEQ ID NO: 88 - protein, 1894 aa, Lytechinus pictus
IIIIIIIICCCCCCKKKKKKKKKRRRRRRRRRRRNNNNNNNNLLLLLLLLDDDDDDDDIIIIIIIIEEEEEEEEERRRRRRRRRRRPPPPPPPSSSSSSYYYYYYYYYYYYTTTTTTTNNNNNNNNLLLLLLLLNNNNNNNNRRRRRRRRRRRLLLLLLLLIIIIIIIISSSSSSQQQQQQQQQVVVVVVVVVVVVVVSSSSSSSSSSSSIIIIIIIITTTTTTTAAAAASSSSSSLLLLLLLLRRRRRRRRRRRFFFFFFFFFFFDDDDDDDDGGGGAAAAALLLLLLLLNNNNNNNNVVVVVVVDDDDDDDDLLLLLLLLTTTTTTTEEEEEEEEEFFFFFFFFFFFQQQQQQQQQTTTTTTTNNNNNNNNLLLLLLLLVVVVVVVPPPPPPPYYYYYYYYYYYYPPPPPPPRRRRRRRRRRRIIIIIIIIHHHHHHHHHHFFFFFFFFFFFPPPPPPPLLLLLLLLVVVVVVVTTTTTTTYYYYYYYYYYYYAAAAAPPPPPPPIIIIIIIIIIIIIIIISSSSSSAAAAAEEEEEEEEEKKKKKKKKKAAAAAYYYYYYYYYYYYHHHHHHHHHHEEEEEEEEEQQQQQQQQQLLLLLLLLAAAAAVVVVVVVAAAAAEEEEEEEEEVVVVVVVTTTTTTTSSSSSSAAAAACCCCCCFFFFFFFFFFFEEEEEEEEEPPPPPPPAAAAANNNNNNNNQQQQQQQQQMMMMMMMMVVVVVVVKKKKKKKKKCCCCCCDDDDDDDDPPPPPPPRRRRRRRRRRRHHHHHHHHHHGGGGKKKKKKKKKYYYYYYYYYYYYMMMMMMMMAAAAACCCCCCCCCCCCMMMMMMMMLLLLLLLLYYYYYYYYYYYYRRRRRRRRRRRGGGGDDDDDDDDVVVVVVVVVVVVVVPPPPPPPKKKKKKKKKDDDDDDDDVVVVVVVNNNNNNNNAAAAAAAAAAIIIIIIIIAAAAATTTTTTTIIIIIIIIKKKKKKKKKTTTTTTTKKKKKKKKKRRRRRRRRRRRSSSSSSIIIIIIIIQQQQQQQQQFFFFFFFFFFFVVVVVVVDDDDDDDDWWWWWWWWWWWWWWCCCCCCPPPPPPPTTTTTTTGGGGFFFFFFFFFFFKKKKKKKKKVVVVVVVGGGGIIIIIIIINNNNNNNNYYYYYYYYYYYYQQQQQQQQQPPPPPPPPPPPPPPTTTTTTTVVVVVVVVVVVVVVLLLLLLLLGGGGGGGGDDDDDDDDLLLLLLLLAAAAAKKKKKKKKKVVVVVVVQQQQQQQQQRRRRRRRRRRRAAAAAVVVVVVVCCCCCCMMMMMMMMLLLLLLLLSSSSSSNNNNNNNNTTTTTTTTTTTTTTAAAAAVVVVVVVAAAAAEEEEEEEEEAAAAAWWWWWWWWWWWWWWAAAAARRRRRRRRRRRLLLLLLLLDDDDDDDDHHHHHHHHHHKKKKKKKKKFFFFFFFFFFFDDDDDDDDLLLLLLLLMMMMMMMMYYYYYYYYYYYYAAAAAKKKKKKKKKRRRRRRRRRRRAAAAAFFFFFFFFFFFVVVVVVVHHHHHHHHHHWWWWWWWWWWWWWWYYYYYYYYYYYYVVVVVVVGGGGEEEEEEEEEGGGGMMMMMMMMEEEEEEEEEEEEEEEEEEGGGGEEEEEEEEEFFFFFFFFFFFSSSSSSEEEEEEEEEAAAAARRRRRRRRRRREEEEEEEEEDDDDDDDDLLLLLLLLAAAAAAAAAALLLLLLLLEEEEEEEEEKKKKKKKKKDDDDDDDDYYYYYYYYYYYYEEEEEEEEEEEEEEEEEEVVVVVVVGGGGLLLLLLLLDDDDDDDDTTTTTTTFFFFFFFFFFFEEEEEEEEEAAAAAEEEEEEEEEEEEEEEEEEEEEEEEEEEEEEEEEEEEGGGGGGGGDDDDDDDDEEEEEEEEEYYYYYYYYYYYYY

SEQ ID NO: 89 - protein, 3465 aa, Oncorhynchus keta
MMMMMMMMHHHHHHHHHHVVVVVVVGGGGQQQQQQQQQAAAAAGGGGVVVVVVVQQQQQQQQQMMMMMMMMGGGGNNNNNNNNAAAAACCCCCCWWWWWWWWWWWWWWEEEEEEEEELLLLLLLLYYYYYYYYYYYYCCCCCCLLLLLLLLEEEEEEEEEHHHHHHHHHHGGGGIIIIIIIIQQQQQQQQQPPPPPPPDDDDDDDDGGGGQQQQQQQQQMMMMMMMMPPPPPPPSSSSSSDDDDDDDDKKKKKKKKKTTTTTTTCCCCCCGGGGGGGGGGGGDDDDDDDDDDDDDDDDSSSSSSFFFFFFFFFFFNNNNNNNNTTTTTTTFFFFFFFFFFFFFFFFFFFFFFSSSSSSEEEEEEEEETTTTTTTGGGGAAAAAGGGGKKKKKKKKKHHHHHHHHHHVVVVVVVPPPPPPPRRRRRRRRRRRAAAAAIIIIIIIIFFFFFFFFFFFVVVVVVVDDDDDDDDLLLLLLLLEEEEEEEEEPPPPPPPTTTTTTTVVVVVVVIIIIIIIIDDDDDDDDEEEEEEEEEVVVVVVVRRRRRRRRRRRTTTTTTTGGGGIIIIIIIIYYYYYYYYYYYYRRRRRRRRRRRQQQQQQQQQLLLLLLLLFFFFFFFFFFFHHHHHHHHHHPPPPPPPEEEEEEEEEQQQQQQQQQLLLLLLLLIIIIIIIITTTTTTTGGGGKKKKKKKKKEEEEEEEEEDDDDDDDDAAAAAAAAAANNNNNNNNNNNNNNNNYYYYYYYYYYYYAAAAARRRRRRRRRRRGGGGHHHHHHHHHHYYYYYYYYYYYYTTTTTTTIIIIIIIIGGGGKKKKKKKKKEEEEEEEEEIIIIIIIIIIIIIIIIDDDDDDDDIIIIIIIIVVVVVVVLLLLLLLLDDDDDDDDRRRRRRRRRRRTTTTTTTRRRRRRRRRRRKKKKKKKKKLLLLLLLLAAAAADDDDDDDDQQQQQQQQQCCCCCCTTTTTTTGGGGLLLLLLLLQQQQQQQQQGGGGFFFFFFFFFFFLLLLLLLLIIIIIIIIFFFFFFFFFFFHHHHHHHHHHSSSSSSFFFFFFFFFFFGGGGGGGGGGGGTTTTTTTGGGGSSSSSSGGGGFFFFFFFFFFFTTTTTTTSSSSSSLLLLLLLLLLLLLLLLMMMMMMMMEEEEEEEEERRRRRRRRRRRLLLLLLLLSSSSSSVVVVVVVDDDDDDDDYYYYYYYYYYYYGGGGKKKKKKKKKKKKKKKKKKSSSSSSKKKKKKKKKLLLLLLLLEEEEEEEEEFFFFFFFFFFFAAAAAVVVVVVVYYYYYYYYYYYYPPPPPPPAAAAAPPPPPPPQQQQQQQQQVVVVVVVSSSSSSTTTTTTTAAAAAVVVVVVVVVVVVVVEEEEEEEEEPPPPPPPYYYYYYYYYYYYNNNNNNNNSSSSSSIIIIIIIILLLLLLLLTTTTTTTTTTTTTTHHHHHHHHHHTTTTTTTTTTTTTTLLLLLLLLEEEEEEEEEHHHHHHHHHHSSSSSSDDDDDDDDCCCCCCAAAAAFFFFFFFFFFFMMMMMMMMVVVVVVVDDDDDDDDNNNNNNNNEEEEEEEEEAAAAAIIIIIIIIYYYYYYYYYYYYDDDDDDDDIIIIIIIICCCCCCRRRRRRRRRRRRRRRRRRRRRRNNNNNNNNLLLLLLLLDDDDDDDDIIIIIIIIEEEEEEEEERRRRRRRRRRRPPPPPPPSSSSSSYYYYYYYYYYYYTTTTTTTNNNNNNNNLLLLLLLLNNNNNNNNRRRRRRRRRRRLLLLLLLLIIIIIIIIGGGGQQQQQQQQQIIIIIIIIVVVVVVVSSSSSSSSSSSSIIIIIIIITTTTTTTAAAAASSSSSSLLLLLLLLRRRRRRRRRRRFFFFFFFFFFFDDDDDDDDGGGGAAAAALLLLLLLLNNNNNNNNVVVVVVVDDDDDDDDLLLLLLLLTTTTTTTEEEEEEEEEFFFFFFFFFFFQQQQQQQQQTTTTTTTNNNNNNNNLLLLLLLLVVVVVVVPPPPPPPYYYYYYYYYYYYPPPPPPPRRRRRRRRRRRIIIIIIIIHHHHHHHHHHFFFFFFFFFFFPPPPPPPLLLLLLLLAAAAATTTTTTTYYYYYYYYYYYYAAAAAPPPPPPPVVVVVVVIIIIIIIISSSSSSAAAAAEEEEEEEEEKKKKKKKKKAAAAAYYYYYYYYYYYYHHHHHHHHHHEEEEEEEEEQQQQQQQQQLLLLLLLLSSSSSSVVVVVVVAAAAADDDDDDDDIIIIIIIITTTTTTTNNNNNNNNAAAAACCCCCCFFFFFFFFFFFEEEEEEEEEPPPPPPPAAAAANNNNNNNNQQQQQQQQQMMMMMMMMVVVVVVVKKKKKKKKKCCCCCCDDDDDDDDPPPPPPPRRRRRRRRRRRHHHHHHHHHHGGGGKKKKKKKKKYYYYYYYYYYYYMMMMMMMMAAAAACCCCCCCCCCCCLLLLLLLLLLLLLLLLYYYYYYYYYYYYRRRRRRRRRRRGGGGDDDDDDDDVVVVVVVVVVVVVVPPPPPPPKKKKKKKKKDDDDDDDDVVVVVVVNNNNNNNNSSSSSSAAAAAIIIIIIIIAAAAAAAAAAIIIIIIIIKKKKKKKKKTTTTTTTKKKKKKKKKRRRRRRRRRRRSSSSSSIIIIIIIIQQQQQQQQQFFFFFFFFFFFVVVVVVVDDDDDDDDWWWWWWWWWWWWWWCCCCCCPPPPPPPTTTTTTTGGGGFFFFFFFFFFFKKKKKKKKKVVVVVVVGGGGIIIIIIIINNNNNNNNYYYYYYYYYYYYQQQQQQQQQPPPPPPPPPPPPPPTTTTTTTVVVVVVVVVVVVVVPPPPPPPGGGGGGGGDDDDDDDDLLLLLLLLAAAAAKKKKKKKKKVVVVVVVQQQQQQQQQRRRRRRRRRRRAAAAAVVVVVVVCCCCCCMMMMMMMMLLLLLLLLSSSSSSNNNNNNNNTTTTTTTTTTTTTTAAAAAIIIIIIIIAAAAAEEEEEEEEEAAAAAWWWWWWWWWWWWWWAAAAARRRRRRRRRRRLLLLLLLLDDDDDDDDHHHHHHHHHHKKKKKKKKKFFFFFFFFFFFDDDDDDDDLLLLLLLLMMMMMMMMYYYYYYYYYYYYAAAAAKKKKKKKKKRRRRRRRRRRRAAAAAFFFFFFFFFFFVVVVVVVHHHHHHHHHHWWWWWWWWWWWWWWYYYYYYYYYYYYVVVVVVVGGGGEEEEEEEEEGGGGMMMMMMMMEEEEEEEEEEEEEEEEEEGGGGEEEEEEEEEFFFFFFFFFFFSSSSSSEEEEEEEEEAAAAARRRRRRRRRRREEEEEEEEEDDDDDDDDMMMMMMMMAAAAAAAAAALLLLLLLLEEEEEEEEEKKKKKKKKKDDDDDDDDYYYYYYYYYYYYEEEEEEEEEEEEEEEEEEVVVVVVVGGGGTTTTTTTDDDDDDDDSSSSSSVVVVVVVGGGGEEEEEEEEEEEEEEEEEEDDDDDDDDEEEEEEEEEEEEEEEEEEGGGGEEEEEEEEEEEEEEEEEEYYYYYYYYYYYYY

SEQ ID NO: 90 - protein, 3481 aa, Oxytricha granulifera
MMMMMMMMRRRRRRRRRRREEEEEEEEEVVVVVVVIIIIIIIISSSSSSIIIIIIIIHHHHHHHHHHVVVVVVVGGGGQQQQQQQQQAAAAAGGGGIIIIIIIIQQQQQQQQQVVVVVVVGGGGNNNNNNNNAAAAACCCCCCWWWWWWWWWWWWWWEEEEEEEEELLLLLLLLFFFFFFFFFFFCCCCCCLLLLLLLLEEEEEEEEEHHHHHHHHHHGGGGIIIIIIIIQQQQQQQQQPPPPPPPDDDDDDDDGGGGQQQQQQQQQMMMMMMMMPPPPPPPSSSSSSDDDDDDDDKKKKKKKKKTTTTTTTIIIIIIIIGGGGGGGGGGGGDDDDDDDDDDDDDDDDAAAAAFFFFFFFFFFFNNNNNNNNTTTTTTTFFFFFFFFFFFFFFFFFFFFFFSSSSSSEEEEEEEEETTTTTTTGGGGAAAAAGGGGKKKKKKKKKHHHHHHHHHHVVVVVVVPPPPPPPRRRRRRRRRRRCCCCCCVVVVVVVFFFFFFFFFFFLLLLLLLLDDDDDDDDLLLLLLLLEEEEEEEEEPPPPPPPTTTTTTTVVVVVVVDDDDDDDDDDDDDDDDEEEEEEEEEVVVVVVVRRRRRRRRRRRTTTTTTTGGGGTTTTTTTYYYYYYYYYYYYRRRRRRRRRRRQQQQQQQQQLLLLLLLLFFFFFFFFFFFHHHHHHHHHHPPPPPPPEEEEEEEEEQQQQQQQQQLLLLLLLLIIIIIIIISSSSSSGGGGKKKKKKKKKEEEEEEEEEDDDDDDDDAAAAAAAAAANNNNNNNNNNNNNNNNFFFFFFFFFFFAAAAARRRRRRRRRRRGGGGHHHHHHHHHHYYYYYYYYYYYYTTTTTTTIIIIIIIIGGGGKKKKKKKKKEEEEEEEEEIIIIIIIIVVVVVVVDDDDDDDDLLLLLLLLCCCCCCLLLLLLLLDDDDDDDDRRRRRRRRRRRIIIIIIIIRRRRRRRRRRRKKKKKKKKKLLLLLLLLAAAAADDDDDDDDQQQQQQQQQCCCCCCTTTTTTTGGGGLLLLLLLLQQQQQQQQQGGGGFFFFFFFFFFFLLLLLLLLVVVVVVVFFFFFFFFFFFNNNNNNNNSSSSSSVVVVVVVGGGGGGGGGGGGTTTTTTTGGGGSSSSSSGGGGLLLLLLLLGGGGSSSSSSLLLLLLLLLLLLLLLLLLLLLLLLEEEEEEEEERRRRRRRRRRRLLLLLLLLSSSSSSVVVVVVVDDDDDDDDYYYYYYYYYYYYGGGGKKKKKKKKKKKKKKKKKKSSSSSSKKKKKKKKKLLLLLLLLGGGGFFFFFFFFFFFTTTTTTTVVVVVVVYYYYYYYYYYYYPPPPPPPSSSSSSPPPPPPPQQQQQQQQQVVVVVVVSSSSSSTTTTTTTAAAAAVVVVVVVVVVVVVVEEEEEEEEEPPPPPPPYYYYYYYYYYYYNNNNNNNNSSSSSSVVVVVVVLLLLLLLLSSSSSSTTTTTTTHHHHHHHHHHSSSSSSLLLLLLLLLLLLLLLLEEEEEEEEEHHHHHHHHHHTTTTTTTDDDDDDDDVVVVVVVAAAAAVVVVVVVMMMMMMMMLLLLLLLLDDDDDDDDNNNNNNNNEEEEEEEEEAAAAAVVVVVVVYYYYYYYYYYYYDDDDDDDDIIIIIIIICCCCCCRRRRRRRRRRRRRRRRRRRRRRNNNNNNNNLLLLLLLLDDDDDDDDIIIIIIIIEEEEEEEEERRRRRRRRRRRPPPPPPPTTTTTTTYYYYYYYYYYYYTTTTTTTNNNNNNNNLLLLLLLLNNNNNNNNRRRRRRRRRRRLLLLLLLLIIIIIIIIAAAAAQQQQQQQQQVVVVVVVIIIIIIIISSSSSSSSSSSSLLLLLLLLTTTTTTTAAAAASSSSSSLLLLLLLLRRRRRRRRRRRFFFFFFFFFFFDDDDDDDDGGGGAAAAALLLLLLLLNNNNNNNNVVVVVVVDDDDDDDDVVVVVVVTTTTTTTEEEEEEEEEFFFFFFFFFFFQQQQQQQQQTTTTTTTNNNNNNNNLLLLLLLLVVVVVVVPPPPPPPYYYYYYYYYYYYPPPPPPPRRRRRRRRRRRIIIIIIIIHHHHHHHHHHFFFFFFFFFFFMMMMMMMMLLLLLLLLSSSSSSSSSSSSYYYYYYYYYYYYAAAAAPPPPPPPVVVVVVVIIIIIIIISSSSSSAAAAAEEEEEEEEEKKKKKKKKKAAAAAYYYYYYYYYYYYHHHHHHHHHHEEEEEEEEEQQQQQQQQQLLLLLLLLSSSSSSVVVVVVVAAAAAEEEEEEEEEIIIIIIIITTTTTTTNNNNNNNNSSSSSSAAAAAFFFFFFFFFFFEEEEEEEEEPPPPPPPAAAAASSSSSSMMMMMMMMMMMMMMMMAAAAAKKKKKKKKKCCCCCCDDDDDDDDPPPPPPPRRRRRRRRRRRHHHHHHHHHHGGGGKKKKKKKKKYYYYYYYYYYYYMMMMMMMMAAAAACCCCCCCCCCCCLLLLLLLLMMMMMMMMYYYYYYYYYYYYRRRRRRRRRRRGGGGDDDDDDDDVVVVVVVVVVVVVVPPPPPPPKKKKKKKKKDDDDDDDDVVVVVVVNNNNNNNNAAAAAAAAAAVVVVVVVAAAAATTTTTTTIIIIIIIIKKKKKKKKKTTTTTTTKKKKKKKKKRRRRRRRRRRRTTTTTTTIIIIIIIIQQQQQQQQQFFFFFFFFFFFVVVVVVVDDDDDDDDWWWWWWWWWWWWWWCCCCCCPPPPPPPTTTTTTTGGGGFFFFFFFFFFFKKKKKKKKKCCCCCCGGGGIIIIIIIINNNNNNNNYYYYYYYYYYYYQQQQQQQQQPPPPPPPPPPPPPPTTTTTTTVVVVVVVVVVVVVVPPPPPPPGGGGGGGGDDDDDDDDLLLLLLLLAAAAAKKKKKKKKKVVVVVVVMMMMMMMMRRRRRRRRRRRAAAAAVVVVVVVCCCCCCMMMMMMMMIIIIIIIISSSSSSNNNNNNNNSSSSSSTTTTTTTAAAAAIIIIIIIIAAAAAEEEEEEEEEVVVVVVVFFFFFFFFFFFSSSSSSRRRRRRRRRRRIIIIIIIIDDDDDDDDHHHHHHHHHHKKKKKKKKKFFFFFFFFFFFDDDDDDDDLLLLLLLLMMMMMMMMYYYYYYYYYYYYAAAAAKKKKKKKKKRRRRRRRRRRRAAAAAFFFFFFFFFFFVVVVVVVHHHHHHHHHHWWWWWWWWWWWWWWYYYYYYYYYYYYVVVVVVVGGGGEEEEEEEEEGGGGMMMMMMMMEEEEEEEEEEEEEEEEEEGGGGEEEEEEEEEFFFFFFFFFFFSSSSSSEEEEEEEEEAAAAARRRRRRRRRRREEEEEEEEEDDDDDDDDLLLLLLLLAAAAAAAAAALLLLLLLLEEEEEEEEEKKKKKKKKKDDDDDDDDYYYYYYYYYYYYEEEEEEEEEEEEEEEEEEVVVVVVVGGGGIIIIIIIIEEEEEEEEETTTTTTTAAAAAEEEEEEEEEGGGGEEEEEEEEEGGGGEEEEEEEEEEEEEEEEEEEEEEEEEEEGGGGMMMMMMMMEEEEEEEEEE

SEQ ID NO: 91 - protein, 885 aa, Picea abies
CCCCCCWWWWWWWWWWWWWWEEEEEEEEELLLLLLLLYYYYYYYYYYYYWWWWWWWWWWWWWWLLLLLLLLEEEEEEEEEHHHHHHHHHHGGGGIIIIIIIIQQQQQQQQQPPPPPPPDDDDDDDDGGGGMMMMMMMMMMMMMMMMPPPPPPPSSSSSSDDDDDDDDTTTTTTTTTTTTTTVVVVVVVGGGGVVVVVVVGGGGDDDDDDDDDDDDDDDDAAAAAFFFFFFFFFFFNNNNNNNNTTTTTTTFFFFFFFFFFFFFFFFFFFFFFSSSSSSEEEEEEEEETTTTTTTGGGGAAAAAGGGGKKKKKKKKKHHHHHHHHHHVVVVVVVPPPPPPPRRRRRRRRRRRAAAAAVVVVVVVFFFFFFFFFFFVVVVVVVDDDDDDDDLLLLLLLLEEEEEEEEEPPPPPPPTTTTTTTVVVVVVVIIIIIIIIDDDDDDDDEEEEEEEEEVVVVVVVRRRRRRRRRRRTTTTTTTGGGGAAAAAYYYYYYYYYYYYRRRRRRRRRRRQQQQQQQQQLLLLLLLLFFFFFFFFFFFHHHHHHHHHHPPPPPPPEEEEEEEEEQQQQQQQQQLLLLLLLLIIIIIIIISSSSSSGGGGKKKKKKKKKEEEEEEEEEDDDDDDDDAAAAAAAAAANNNNNNNNNNNNNNNNFFFFFFFFFFFAAAAARRRRRRRRRRRGGGGHHHHHHHHHHYYYYYYYYYYYYTTTTTTTVVVVVVVGGGGEEEEEEEEEEEEEEEEEEIIIIIIIIVVVVVVVDDDDDDDDLLLLLLLLCCCCCCLLLLLLLLDDDDDDDDRRRRRRRRRRRVVVVVVVRRRRRRRRRRRKKKKKKKKKLLLLLLLLAAAAADDDDDDDDNNNNNNNNCCCCCCTTTTTTTGGGGLLLLLLLLL

SEQ ID NO: 92 - protein, 3519 aa, Sus scrofa
MMMMMMMMRRRRRRRRRRREEEEEEEEECCCCCCIIIIIIIISSSSSSIIIIIIIIHHHHHHHHHHVVVVVVVGGGGQQQQQQQQQAAAAAGGGGVVVVVVVQQQQQQQQQIIIIIIIIGGGGNNNNNNNNAAAAACCCCCCWWWWWWWWWWWWWWEEEEEEEEELLLLLLLLYYYYYYYYYYYYCCCCCCLLLLLLLLEEEEEEEEEHHHHHHHHHHGGGGIIIIIIIIQQQQQQQQQPPPPPPPDDDDDDDDGGGGQQQQQQQQQMMMMMMMMPPPPPPPSSSSSSDDDDDDDDKKKKKKKKKTTTTTTTIIIIIIIIGGGGGGGGGGGGDDDDDDDDDDDDDDDDSSSSSSFFFFFFFFFFFNNNNNNNNTTTTTTTFFFFFFFFFFFFFFFFFFFFFFSSSSSSEEEEEEEEETTTTTTTGGGGAAAAAGGGGKKKKKKKKKHHHHHHHHHHVVVVVVVPPPPPPPRRRRRRRRRRRAAAAAVVVVVVVFFFFFFFFFFFVVVVVVVDDDDDDDDLLLLLLLLEEEEEEEEEPPPPPPPTTTTTTTVVVVVVVIIIIIIIIDDDDDDDDEEEEEEEEEVVVVVVVRRRRRRRRRRRTTTTTTTGGGGTTTTTTTYYYYYYYYYYYYRRRRRRRRRRRQQQQQQQQQLLLLLLLLFFFFFFFFFFFHHHHHHHHHHPPPPPPPEEEEEEEEEQQQQQQQQQLLLLLLLLIIIIIIIITTTTTTTGGGGKKKKKKKKKEEEEEEEEEDDDDDDDDAAAAAAAAAANNNNNNNNNNNNNNNNYYYYYYYYYYYYAAAAARRRRRRRRRRRGGGGHHHHHHHHHHYYYYYYYYYYYYTTTTTTTIIIIIIIIGGGGKKKKKKKKKEEEEEEEEEIIIIIIIIIIIIIIIIDDDDDDDDLLLLLLLLVVVVVVVLLLLLLLLDDDDDDDDRRRRRRRRRRRIIIIIIIIRRRRRRRRRRRKKKKKKKKKLLLLLLLLAAAAADDDDDDDDQQQQQQQQQCCCCCCTTTTTTTGGGGLLLLLLLLQQQQQQQQQGGGGFFFFFFFFFFFSSSSSSVVVVVVVFFFFFFFFFFFHHHHHHHHHHSSSSSSFFFFFFFFFFFGGGGGGGGGGGGTTTTTTTGGGGSSSSSSGGGGFFFFFFFFFFFTTTTTTTSSSSSSLLLLLLLLLLLLLLLLMMMMMMMMEEEEEEEEERRRRRRRRRRRLLLLLLLLSSSSSSVVVVVVVDDDDDDDDYYYYYYYYYYYYGGGGKKKKKKKKKKKKKKKKKKSSSSSSKKKKKKKKKLLLLLLLLEEEEEEEEEFFFFFFFFFFFSSSSSSIIIIIIIIYYYYYYYYYYYYPPPPPPPAAAAAPPPPPPPQQQQQQQQQVVVVVVVSSSSSSTTTTTTTAAAAAVVVVVVVVVVVVVVEEEEEEEEEPPPPPPPYYYYYYYYYYYYNNNNNNNNSSSSSSIIIIIIIILLLLLLLLTTTTTTTTTTTTTTHHHHHHHHHHTTTTTTTTTTTTTTLLLLLLLLEEEEEEEEEHHHHHHHHHHSSSSSSDDDDDDDDCCCCCCAAAAAFFFFFFFFFFFMMMMMMMMVVVVVVVDDDDDDDDNNNNNNNNEEEEEEEEEAAAAAIIIIIIIIYYYYYYYYYYYYDDDDDDDDIIIIIIIICCCCCCRRRRRRRRRRRRRRRRRRRRRRNNNNNNNNLLLLLLLLDDDDDDDDIIIIIIIIEEEEEEEEERRRRRRRRRRRPPPPPPPTTTTTTTYYYYYYYYYYYYTTTTTTTNNNNNNNNLLLLLLLLNNNNNNNNRRRRRRRRRRRLLLLLLLLIIIIIIIIGGGGQQQQQQQQQIIIIIIIIVVVVVVVSSSSSSSSSSSSIIIIIIIITTTTTTTAAAAASSSSSSLLLLLLLLRRRRRRRRRRRFFFFFFFFFFFDDDDDDDDGGGGAAAAALLLLLLLLNNNNNNNNVVVVVVVDDDDDDDDLLLLLLLLTTTTTTTEEEEEEEEEFFFFFFFFFFFQQQQQQQQQTTTTTTTNNNNNNNNLLLLLLLLVVVVVVVPPPPPPPYYYYYYYYYYYYPPPPPPPRRRRRRRRRRRAAAAAHHHHHHHHHHFFFFFFFFFFFPPPPPPPLLLLLLLLAAAAATTTTTTTYYYYYYYYYYYYAAAAAPPPPPPPVVVVVVVIIIIIIIISSSSSSAAAAAEEEEEEEEEKKKKKKKKKAAAAAYYYYYYYYYYYYHHHHHHHHHHEEEEEEEEEQQQQQQQQQLLLLLLLLSSSSSSVVVVVVVAAAAAEEEEEEEEEIIIIIIIITTTTTTTNNNNNNNNAAAAACCCCCCFFFFFFFFFFFEEEEEEEEEPPPPPPPAAAAANNNNNNNNQQQQQQQQQMMMMMMMMVVVVVVVKKKKKKKKKCCCCCCDDDDDDDDPPPPPPPRRRRRRRRRRRHHHHHHHHHHGGGGKKKKKKKKKYYYYYYYYYYYYMMMMMMMMAAAAACCCCCCCCCCCCLLLLLLLLLLLLLLLLYYYYYYYYYYYYRRRRRRRRRRRGGGGDDDDDDDDVVVVVVVVVVVVVVPPPPPPPKKKKKKKKKDDDDDDDDVVVVVVVNNNNNNNNAAAAAAAAAAIIIIIIIIAAAAATTTTTTTIIIIIIIIKKKKKKKKKTTTTTTTKKKKKKKKKRRRRRRRRRRRTTTTTTTIIIIIIIIQQQQQQQQQFFFFFFFFFFFVVVVVVVDDDDDDDDWWWWWWWWWWWWWWCCCCCCPPPPPPPTTTTTTTGGGGFFFFFFFFFFFKKKKKKKKKVVVVVVVGGGGIIIIIIIINNNNNNNNYYYYYYYYYYYYEEEEEEEEEPPPPPPPPPPPPPPTTTTTTTVVVVVVVVVVVVVVPPPPPPPGGGGGGGGDDDDDDDDLLLLLLLLAAAAAKKKKKKKKKVVVVVVVQQQQQQQQQRRRRRRRRRRRAAAAAVVVVVVVCCCCCCMMMMMMMMLLLLLLLLSSSSSSNNNNNNNNTTTTTTTTTTTTTTAAAAAIIIIIIIIAAAAAEEEEEEEEEAAAAAWWWWWWWWWWWWWWAAAAARRRRRRRRRRRLLLLLLLLDDDDDDDDHHHHHHHHHHKKKKKKKKKFFFFFFFFFFFDDDDDDDDLLLLLLLLMMMMMMMMYYYYYYYYYYYYAAAAAKKKKKKKKKRRRRRRRRRRRAAAAAFFFFFFFFFFFVVVVVVVHHHHHHHHHHWWWWWWWWWWWWWWYYYYYYYYYYYYVVVVVVVGGGGEEEEEEEEEGGGGMMMMMMMMEEEEEEEEEEEEEEEEEEGGGGEEEEEEEEEFFFFFFFFFFFSSSSSSEEEEEEEEEAAAAARRRRRRRRRRREEEEEEEEEDDDDDDDDMMMMMMMMAAAAAAAAAALLLLLLLLEEEEEEEEEKKKKKKKKKDDDDDDDDYYYYYYYYYYYYEEEEEEEEEEEEEEEEEEVVVVVVVGGGGVVVVVVVDDDDDDDDSSSSSSVVVVVVVEEEEEEEEEGGGGEEEEEEEEEGGGGEEEEEEEEEEEEEEEEEEEEEEEEEEEGGGGEEEEEEEEEEEEEEEEEEYYYYYYYYYYYYY

SEQ ID NO: 93 - protein, 3524 aa, Plasmodium falciparum
MMMMMMMMRRRRRRRRRRREEEEEEEEEVVVVVVVIIIIIIIISSSSSSIIIIIIIIHHHHHHHHHHVVVVVVVGGGGQQQQQQQQQAAAAAGGGGIIIIIIIIQQQQQQQQQVVVVVVVGGGGNNNNNNNNAAAAACCCCCCWWWWWWWWWWWWWWEEEEEEEEELLLLLLLLFFFFFFFFFFFCCCCCCLLLLLLLLEEEEEEEEEHHHHHHHHHHGGGGIIIIIIIIQQQQQQQQQPPPPPPPDDDDDDDDGGGGQQQQQQQQQMMMMMMMMPPPPPPPSSSSSSDDDDDDDDKKKKKKKKKAAAAASSSSSSRRRRRRRRRRRAAAAANNNNNNNNDDDDDDDDDDDDDDDDAAAAAFFFFFFFFFFFNNNNNNNNTTTTTTTFFFFFFFFFFFFFFFFFFFFFFSSSSSSEEEEEEEEETTTTTTTGGGGAAAAAGGGGKKKKKKKKKHHHHHHHHHHVVVVVVVPPPPPPPRRRRRRRRRRRCCCCCCVVVVVVVFFFFFFFFFFFVVVVVVVDDDDDDDDLLLLLLLLEEEEEEEEEPPPPPPPTTTTTTTVVVVVVVVVVVVVVDDDDDDDDEEEEEEEEEVVVVVVVRRRRRRRRRRRTTTTTTTGGGGTTTTTTTYYYYYYYYYYYYRRRRRRRRRRRQQQQQQQQQLLLLLLLLFFFFFFFFFFFHHHHHHHHHHPPPPPPPEEEEEEEEEQQQQQQQQQLLLLLLLLIIIIIIIISSSSSSGGGGKKKKKKKKKEEEEEEEEEDDDDDDDDAAAAAAAAAANNNNNNNNNNNNNNNNFFFFFFFFFFFAAAAARRRRRRRRRRRGGGGHHHHHHHHHHYYYYYYYYYYYYTTTTTTTIIIIIIIIGGGGKKKKKKKKKEEEEEEEEEVVVVVVVIIIIIIIIDDDDDDDDVVVVVVVCCCCCCLLLLLLLLDDDDDDDDRRRRRRRRRRRIIIIIIIIRRRRRRRRRRRKKKKKKKKKLLLLLLLLAAAAADDDDDDDDNNNNNNNNCCCCCCTTTTTTTGGGGLLLLLLLLQQQQQQQQQGGGGFFFFFFFFFFFLLLLLLLLMMMMMMMMFFFFFFFFFFFSSSSSSAAAAAVVVVVVVGGGGGGGGGGGGTTTTTTTGGGGSSSSSSGGGGFFFFFFFFFFFGGGGCCCCCCLLLLLLLLMMMMMMMMLLLLLLLLEEEEEEEEERRRRRRRRRRRLLLLLLLLSSSSSSVVVVVVVDDDDDDDDYYYYYYYYYYYYGGGGKKKKKKKKKKKKKKKKKKSSSSSSKKKKKKKKKLLLLLLLLNNNNNNNNFFFFFFFFFFFCCCCCCCCCCCCWWWWWWWWWWWWWWPPPPPPPSSSSSSPPPPPPPQQQQQQQQQVVVVVVVSSSSSSTTTTTTTAAAAAVVVVVVVVVVVVVVEEEEEEEEEPPPPPPPYYYYYYYYYYYYNNNNNNNNSSSSSSVVVVVVVLLLLLLLLSSSSSSTTTTTTTHHHHHHHHHHSSSSSSLLLLLLLLLLLLLLLLEEEEEEEEEHHHHHHHHHHTTTTTTTDDDDDDDDVVVVVVVAAAAAIIIIIIIIMMMMMMMMLLLLLLLLDDDDDDDDNNNNNNNNEEEEEEEEEAAAAAIIIIIIIIYYYYYYYYYYYYDDDDDDDDIIIIIIIICCCCCCRRRRRRRRRRRRRRRRRRRRRRNNNNNNNNLLLLLLLLDDDDDDDDIIIIIIIIEEEEEEEEERRRRRRRRRRRPPPPPPPTTTTTTTYYYYYYYYYYYYTTTTTTTNNNNNNNNLLLLLLLLNNNNNNNNRRRRRRRRRRRLLLLLLLLIIIIIIIIAAAAAQQQQQQQQQVVVVVVVIIIIIIIISSSSSSSSSSSSLLLLLLLLTTTTTTTAAAAASSSSSSLLLLLLLLRRRRRRRRRRRFFFFFFFFFFFDDDDDDDDGGGGAAAAALLLLLLLLNNNNNNNNVVVVVVVDDDDDDDDVVVVVVVTTTTTTTEEEEEEEEEFFFFFFFFFFFQQQQQQQQQTTTTTTTNNNNNNNNLLLLLLLLVVVVVVVPPPPPPPYYYYYYYYYYYYPPPPPPPRRRRRRRRRRRIIIIIIIIHHHHHHHHHHFFFFFFFFFFFMMMMMMMMLLLLLLLLSSSSSSSSSSSSYYYYYYYYYYYYAAAAAPPPPPPPVVVVVVVVVVVVVVSSSSSSAAAAAEEEEEEEEEKKKKKKKKKAAAAAYYYYYYYYYYYYHHHHHHHHHHEEEEEEEEEQQQQQQQQQLLLLLLLLSSSSSSVVVVVVVSSSSSSEEEEEEEEEIIIIIIIITTTTTTTNNNNNNNNSSSSSSAAAAAFFFFFFFFFFFEEEEEEEEEPPPPPPPAAAAANNNNNNNNMMMMMMMMMMMMMMMMAAAAAKKKKKKKKKCCCCCCDDDDDDDDPPPPPPPRRRRRRRRRRRHHHHHHHHHHGGGGKKKKKKKKKYYYYYYYYYYYYMMMMMMMMAAAAACCCCCCCCCCCCLLLLLLLLMMMMMMMMYYYYYYYYYYYYRRRRRRRRRRRGGGGDDDDDDDDVVVVVVVVVVVVVVPPPPPPPKKKKKKKKKDDDDDDDDVVVVVVVNNNNNNNNAAAAAAAAAAVVVVVVVAAAAATTTTTTTIIIIIIIIKKKKKKKKKTTTTTTTKKKKKKKKKRRRRRRRRRRRTTTTTTTIIIIIIIIQQQQQQQQQFFFFFFFFFFFVVVVVVVDDDDDDDDWWWWWWWWWWWWWWCCCCCCPPPPPPPTTTTTTTGGGGFFFFFFFFFFFKKKKKKKKKCCCCCCGGGGIIIIIIIINNNNNNNNYYYYYYYYYYYYQQQQQQQQQPPPPPPPPPPPPPPTTTTTTTVVVVVVVVVVVVVVPPPPPPPGGGGGGGGDDDDDDDDLLLLLLLLAAAAAKKKKKKKKKVVVVVVVMMMMMMMMRRRRRRRRRRRAAAAAVVVVVVVCCCCCCMMMMMMMMIIIIIIIISSSSSSNNNNNNNNSSSSSSTTTTTTTAAAAAIIIIIIIIAAAAAEEEEEEEEEVVVVVVVFFFFFFFFFFFSSSSSSRRRRRRRRRRRMMMMMMMMDDDDDDDDQQQQQQQQQKKKKKKKKKFFFFFFFFFFFDDDDDDDDLLLLLLLLMMMMMMMMYYYYYYYYYYYYAAAAAKKKKKKKKKRRRRRRRRRRRAAAAAFFFFFFFFFFFVVVVVVVHHHHHHHHHHWWWWWWWWWWWWWWYYYYYYYYYYYYVVVVVVVGGGGEEEEEEEEEGGGGMMMMMMMMEEEEEEEEEEEEEEEEEEGGGGEEEEEEEEEFFFFFFFFFFFSSSSSSEEEEEEEEEAAAAARRRRRRRRRRREEEEEEEEEDDDDDDDDLLLLLLLLAAAAAAAAAALLLLLLLLEEEEEEEEEKKKKKKKKKDDDDDDDDYYYYYYYYYYYYEEEEEEEEEEEEEEEEEEVVVVVVVGGGGIIIIIIIIEEEEEEEEESSSSSSNNNNNNNNEEEEEEEEEAAAAAEEEEEEEEEGGGGEEEEEEEEEDDDDDDDDEEEEEEEEEGGGGYYYYYYYYYYYYEEEEEEEEEAAAAADDDDDDDDYYYYYYYYYYYYY

SEQ ID NO: 94 - protein, 1548 aa, Plasmodium berghei
EEEEEEEEEFFFFFFFFFFFQQQQQQQQQTTTTTTTNNNNNNNNLLLLLLLLVVVVVVVPPPPPPPYYYYYYYYYYYYPPPPPPPRRRRRRRRRRRIIIIIIIIHHHHHHHHHHFFFFFFFFFFFMMMMMMMMLLLLLLLLSSSSSSSSSSSSYYYYYYYYYYYYAAAAAPPPPPPPVVVVVVVIIIIIIIISSSSSSAAAAAEEEEEEEEEKKKKKKKKKAAAAAYYYYYYYYYYYYHHHHHHHHHHEEEEEEEEEQQQQQQQQQLLLLLLLLSSSSSSVVVVVVVSSSSSSEEEEEEEEEIIIIIIIITTTTTTTNNNNNNNNSSSSSSAAAAAFFFFFFFFFFFEEEEEEEEEPPPPPPPAAAAASSSSSSMMMMMMMMMMMMMMMMAAAAAKKKKKKKKKCCCCCCDDDDDDDDPPPPPPPRRRRRRRRRRRHHHHHHHHHHGGGGKKKKKKKKKYYYYYYYYYYYYMMMMMMMMAAAAACCCCCCCCCCCCLLLLLLLLMMMMMMMMYYYYYYYYYYYYRRRRRRRRRRRGGGGDDDDDDDDVVVVVVVVVVVVVVPPPPPPPKKKKKKKKKDDDDDDDDVVVVVVVNNNNNNNNAAAAAAAAAAVVVVVVVAAAAATTTTTTTIIIIIIIIKKKKKKKKKTTTTTTTKKKKKKKKKRRRRRRRRRRRSSSSSSIIIIIIIIQQQQQQQQQFFFFFFFFFFFVVVVVVVDDDDDDDDWWWWWWWWWWWWWWCCCCCCPPPPPPPTTTTTTTGGGGFFFFFFFFFFFKKKKKKKKKCCCCCCGGGGIIIIIIIINNNNNNNNYYYYYYYYYYYYQQQQQQQQQPPPPPPPPPPPPPPTTTTTTTVVVVVVVVVVVVVVPPPPPPPGGGGGGGGDDDDDDDDLLLLLLLLAAAAAKKKKKKKKKVVVVVVVMMMMMMMMRRRRRRRRRRRAAAAAVVVVVVVCCCCCCMMMMMMMMIIIIIIIISSSSSSNNNNNNNNSSSSSSTTTTTTTAAAAAIIIIIIIIAAAAAEEEEEEEEEVVVVVVVFFFFFFFFFFFSSSSSSRRRRRRRRRRRIIIIIIIIWWWWWWWWWWWWWWPPPPPPPKKKKKKKKKFFFFFFFFFFFDDDDDDDDLLLLLLLLMMMMMMMMYYYYYYYYYYYYAAAAAMMMMMMMMRRRRRRRRRRRAAAAAFFFFFFFFFFFVVVVVVVHHHHHHHHHHWWWWWWWWWWWWWWYYYYYYYYYYYYVVVVVVVGGGGEEEEEEEEEGGGGMMMMMMMMEEEEEEEEEEEEEEEEEEGGGGEEEEEEEEEFFFFFFFFFFFSSSSSSEEEEEEEEEAAAAARRRRRRRRRRREEEEEEEEEDDDDDDDDLLLLLLLLAAAAAAAAAALLLLLLLLEEEEEEEEEKKKKKKKKKDDDDDDDDYYYYYYYYYYYYEEEEEEEEEEEEEEEEEEVVVVVVVGGGGIIIIIIIIEEEEEEEEETTTTTTTNNNNNNNNDDDDDDDDGGGGEEEEEEEEEGGGGEEEEEEEEEDDDDDDDDEEEEEEEEEGGGGYYYYYYYYYYYYEEEEEEEEEE

SEQ ID NO: 95 - protein, 3478 aa, Prunus dulcis
MMMMMMMMRRRRRRRRRRREEEEEEEEECCCCCCIIIIIIIISSSSSSIIIIIIIIHHHHHHHHHHIIIIIIIIGGGGQQQQQQQQQAAAAAGGGGIIIIIIIIQQQQQQQQQVVVVVVVGGGGNNNNNNNNAAAAACCCCCCWWWWWWWWWWWWWWEEEEEEEEELLLLLLLLYYYYYYYYYYYYCCCCCCLLLLLLLLEEEEEEEEEHHHHHHHHHHGGGGIIIIIIIIQQQQQQQQQPPPPPPPDDDDDDDDGGGGQQQQQQQQQMMMMMMMMPPPPPPPGGGGDDDDDDDDKKKKKKKKKTTTTTTTVVVVVVVGGGGGGGGGGGGDDDDDDDDDDDDDDDDAAAAAFFFFFFFFFFFNNNNNNNNTTTTTTTFFFFFFFFFFFFFFFFFFFFFFSSSSSSEEEEEEEEETTTTTTTGGGGAAAAAGGGGKKKKKKKKKHHHHHHHHHHVVVVVVVPPPPPPPRRRRRRRRRRRAAAAAVVVVVVVFFFFFFFFFFFVVVVVVVDDDDDDDDLLLLLLLLEEEEEEEEEPPPPPPPTTTTTTTVVVVVVVIIIIIIIIDDDDDDDDEEEEEEEEEVVVVVVVRRRRRRRRRRRTTTTTTTGGGGTTTTTTTYYYYYYYYYYYYRRRRRRRRRRRQQQQQQQQQLLLLLLLLFFFFFFFFFFFHHHHHHHHHHPPPPPPPEEEEEEEEEQQQQQQQQQLLLLLLLLIIIIIIIISSSSSSGGGGKKKKKKKKKEEEEEEEEEDDDDDDDDAAAAAAAAAANNNNNNNNNNNNNNNNFFFFFFFFFFFAAAAARRRRRRRRRRRGGGGHHHHHHHHHHYYYYYYYYYYYYTTTTTTTIIIIIIIIGGGGKKKKKKKKKEEEEEEEEEIIIIIIIIVVVVVVVDDDDDDDDLLLLLLLLCCCCCCLLLLLLLLDDDDDDDDRRRRRRRRRRRIIIIIIIIRRRRRRRRRRRKKKKKKKKKLLLLLLLLAAAAADDDDDDDDNNNNNNNNCCCCCCTTTTTTTGGGGLLLLLLLLQQQQQQQQQGGGGFFFFFFFFFFFLLLLLLLLVVVVVVVFFFFFFFFFFFNNNNNNNNAAAAAVVVVVVVGGGGGGGGGGGGTTTTTTTGGGGSSSSSSGGGGLLLLLLLLGGGGSSSSSSLLLLLLLLLLLLLLLLLLLLLLLLEEEEEEEEERRRRRRRRRRRLLLLLLLLSSSSSSVVVVVVVDDDDDDDDYYYYYYYYYYYYGGGGKKKKKKKKKKKKKKKKKKSSSSSSKKKKKKKKKLLLLLLLLGGGGFFFFFFFFFFFTTTTTTTVVVVVVVYYYYYYYYYYYYPPPPPPPSSSSSSPPPPPPPQQQQQQQQQVVVVVVVSSSSSSTTTTTTTSSSSSSVVVVVVVVVVVVVVEEEEEEEEEPPPPPPPYYYYYYYYYYYYNNNNNNNNSSSSSSVVVVVVVLLLLLLLLSSSSSSTTTTTTTHHHHHHHHHHSSSSSSLLLLLLLLLLLLLLLLEEEEEEEEEHHHHHHHHHHTTTTTTTDDDDDDDDVVVVVVVAAAAAVVVVVVVLLLLLLLLLLLLLLLLDDDDDDDDNNNNNNNNEEEEEEEEEAAAAAIIIIIIIIYYYYYYYYYYYYDDDDDDDDIIIIIIIICCCCCCRRRRRRRRRRRRRRRRRRRRRRSSSSSSLLLLLLLLDDDDDDDDIIIIIIIIEEEEEEEEERRRRRRRRRRRPPPPPPPTTTTTTTYYYYYYYYYYYYTTTTTTTNNNNNNNNLLLLLLLLNNNNNNNNRRRRRRRRRRRLLLLLLLLVVVVVVVSSSSSSQQQQQQQQQVVVVVVVIIIIIIIISSSSSSSSSSSSLLLLLLLLTTTTTTTAAAAASSSSSSLLLLLLLLRRRRRRRRRRRFFFFFFFFFFFDDDDDDDDGGGGAAAAALLLLLLLLNNNNNNNNVVVVVVVDDDDDDDDVVVVVVVTTTTTTTEEEEEEEEEFFFFFFFFFFFQQQQQQQQQTTTTTTTNNNNNNNNLLLLLLLLVVVVVVVPPPPPPPYYYYYYYYYYYYPPPPPPPRRRRRRRRRRRIIIIIIIIHHHHHHHHHHFFFFFFFFFFFMMMMMMMMLLLLLLLLSSSSSSSSSSSSYYYYYYYYYYYYAAAAAPPPPPPPVVVVVVVIIIIIIIISSSSSSAAAAAEEEEEEEEEKKKKKKKKKAAAAAYYYYYYYYYYYYHHHHHHHHHHEEEEEEEEEQQQQQQQQQLLLLLLLLSSSSSSVVVVVVVAAAAAEEEEEEEEEIIIIIIIITTTTTTTNNNNNNNNSSSSSSAAAAAFFFFFFFFFFFEEEEEEEEEPPPPPPPSSSSSSSSSSSSMMMMMMMMMMMMMMMMAAAAAKKKKKKKKKCCCCCCDDDDDDDDPPPPPPPRRRRRRRRRRRHHHHHHHHHHGGGGKKKKKKKKKYYYYYYYYYYYYMMMMMMMMAAAAACCCCCCCCCCCCLLLLLLLLMMMMMMMMYYYYYYYYYYYYRRRRRRRRRRRGGGGDDDDDDDDVVVVVVVVVVVVVVPPPPPPPKKKKKKKKKDDDDDDDDVVVVVVVNNNNNNNNAAAAAAAAAAVVVVVVVAAAAATTTTTTTIIIIIIIIKKKKKKKKKTTTTTTTKKKKKKKKKRRRRRRRRRRRTTTTTTTIIIIIIIIQQQQQQQQQFFFFFFFFFFFVVVVVVVDDDDDDDDWWWWWWWWWWWWWWCCCCCCPPPPPPPTTTTTTTGGGGFFFFFFFFFFFKKKKKKKKKCCCCCCGGGGIIIIIIIINNNNNNNNYYYYYYYYYYYYQQQQQQQQQPPPPPPPPPPPPPPTTTTTTTVVVVVVVVVVVVVVPPPPPPPGGGGGGGGDDDDDDDDLLLLLLLLAAAAAKKKKKKKKKVVVVVVVQQQQQQQQQRRRRRRRRRRRAAAAAVVVVVVVCCCCCCMMMMMMMMIIIIIIIISSSSSSNNNNNNNNSSSSSSTTTTTTTSSSSSSVVVVVVVAAAAAEEEEEEEEEVVVVVVVFFFFFFFFFFFSSSSSSRRRRRRRRRRRIIIIIIIIDDDDDDDDHHHHHHHHHHKKKKKKKKKFFFFFFFFFFFDDDDDDDDLLLLLLLLMMMMMMMMYYYYYYYYYYYYAAAAAKKKKKKKKKRRRRRRRRRRRAAAAAFFFFFFFFFFFVVVVVVVHHHHHHHHHHWWWWWWWWWWWWWWYYYYYYYYYYYYVVVVVVVGGGGEEEEEEEEEGGGGMMMMMMMMEEEEEEEEEEEEEEEEEEGGGGEEEEEEEEEFFFFFFFFFFFSSSSSSEEEEEEEEEAAAAARRRRRRRRRRREEEEEEEEEDDDDDDDDLLLLLLLLAAAAAAAAAALLLLLLLLEEEEEEEEEKKKKKKKKKDDDDDDDDYYYYYYYYYYYYEEEEEEEEEEEEEEEEEEVVVVVVVGGGGAAAAAEEEEEEEEESSSSSSAAAAAEEEEEEEEEGGGGEEEEEEEEEDDDDDDDDDDDDDDDDEEEEEEEEEGGGGDDDDDDDDDDDDDDDDYYYYYYYYYYYYY

SEQ ID NO: 96 - protein, 3499 aa, Sordaria macrospora
MMMMMMMMRRRRRRRRRRREEEEEEEEEIIIIIIIIIIIIIIIISSSSSSLLLLLLLLNNNNNNNNVVVVVVVGGGGQQQQQQQQQAAAAAGGGGCCCCCCQQQQQQQQQIIIIIIIIAAAAANNNNNNNNSSSSSSCCCCCCWWWWWWWWWWWWWWEEEEEEEEELLLLLLLLYYYYYYYYYYYYCCCCCCLLLLLLLLEEEEEEEEEHHHHHHHHHHGGGGIIIIIIIIQQQQQQQQQPPPPPPPDDDDDDDDGGGGYYYYYYYYYYYYLLLLLLLLTTTTTTTEEEEEEEEEEEEEEEEEERRRRRRRRRRRKKKKKKKKKAAAAAAAAAADDDDDDDDPPPPPPPDDDDDDDDHHHHHHHHHHGGGGFFFFFFFFFFFSSSSSSTTTTTTTFFFFFFFFFFFFFFFFFFFFFFSSSSSSEEEEEEEEETTTTTTTGGGGNNNNNNNNGGGGKKKKKKKKKYYYYYYYYYYYYVVVVVVVPPPPPPPRRRRRRRRRRRTTTTTTTIIIIIIIIYYYYYYYYYYYYAAAAADDDDDDDDLLLLLLLLEEEEEEEEEPPPPPPPNNNNNNNNVVVVVVVIIIIIIIIDDDDDDDDEEEEEEEEEVVVVVVVRRRRRRRRRRRTTTTTTTGGGGAAAAAYYYYYYYYYYYYRRRRRRRRRRRGGGGLLLLLLLLFFFFFFFFFFFHHHHHHHHHHPPPPPPPEEEEEEEEEHHHHHHHHHHMMMMMMMMIIIIIIIISSSSSSGGGGKKKKKKKKKEEEEEEEEEDDDDDDDDAAAAASSSSSSNNNNNNNNNNNNNNNNYYYYYYYYYYYYAAAAARRRRRRRRRRRGGGGHHHHHHHHHHYYYYYYYYYYYYTTTTTTTVVVVVVVGGGGKKKKKKKKKEEEEEEEEELLLLLLLLIIIIIIIIDDDDDDDDQQQQQQQQQVVVVVVVLLLLLLLLDDDDDDDDKKKKKKKKKVVVVVVVRRRRRRRRRRRRRRRRRRRRRRVVVVVVVAAAAADDDDDDDDNNNNNNNNCCCCCCSSSSSSGGGGLLLLLLLLQQQQQQQQQGGGGFFFFFFFFFFFLLLLLLLLVVVVVVVFFFFFFFFFFFHHHHHHHHHHSSSSSSFFFFFFFFFFFGGGGGGGGGGGGTTTTTTTGGGGSSSSSSGGGGFFFFFFFFFFFGGGGAAAAALLLLLLLLLLLLLLLLMMMMMMMMEEEEEEEEERRRRRRRRRRRLLLLLLLLSSSSSSVVVVVVVDDDDDDDDYYYYYYYYYYYYGGGGKKKKKKKKKKKKKKKKKKSSSSSSKKKKKKKKKLLLLLLLLEEEEEEEEEFFFFFFFFFFFCCCCCCVVVVVVVYYYYYYYYYYYYPPPPPPPAAAAAPPPPPPPQQQQQQQQQTTTTTTTAAAAATTTTTTTSSSSSSVVVVVVVVVVVVVVEEEEEEEEEPPPPPPPYYYYYYYYYYYYHHHHHHHHHHNNNNNNNNFFFFFFFFFFFLLLLLLLLTTTTTTTTTTTTTTNNNNNNNNTTTTTTTTTTTTTTLLLLLLLLEEEEEEEEEQQQQQQQQQAAAAADDDDDDDDCCCCCCSSSSSSFFFFFFFFFFFMMMMMMMMVVVVVVVDDDDDDDDNNNNNNNNEEEEEEEEEAAAAAIIIIIIIIYYYYYYYYYYYYDDDDDDDDIIIIIIIICCCCCCRRRRRRRRRRRRRRRRRRRRRRNNNNNNNNLLLLLLLLGGGGLLLLLLLLEEEEEEEEERRRRRRRRRRRPPPPPPPNNNNNNNNYYYYYYYYYYYYEEEEEEEEENNNNNNNNLLLLLLLLNNNNNNNNRRRRRRRRRRRLLLLLLLLIIIIIIIIAAAAAQQQQQQQQQVVVVVVVVVVVVVVSSSSSSSSSSSSIIIIIIIITTTTTTTAAAAASSSSSSLLLLLLLLRRRRRRRRRRRFFFFFFFFFFFDDDDDDDDGGGGSSSSSSLLLLLLLLNNNNNNNNVVVVVVVDDDDDDDDLLLLLLLLNNNNNNNNEEEEEEEEEFFFFFFFFFFFQQQQQQQQQTTTTTTTNNNNNNNNLLLLLLLLVVVVVVVPPPPPPPYYYYYYYYYYYYPPPPPPPRRRRRRRRRRRIIIIIIIIHHHHHHHHHHFFFFFFFFFFFPPPPPPPLLLLLLLLVVVVVVVAAAAAYYYYYYYYYYYYAAAAAPPPPPPPVVVVVVVIIIIIIIISSSSSSAAAAAAAAAAKKKKKKKKKAAAAAAAAAAHHHHHHHHHHEEEEEEEEEAAAAANNNNNNNNSSSSSSVVVVVVVQQQQQQQQQEEEEEEEEEMMMMMMMMTTTTTTTMMMMMMMMSSSSSSCCCCCCFFFFFFFFFFFEEEEEEEEEPPPPPPPNNNNNNNNNNNNNNNNQQQQQQQQQMMMMMMMMVVVVVVVKKKKKKKKKCCCCCCDDDDDDDDPPPPPPPRRRRRRRRRRRHHHHHHHHHHGGGGKKKKKKKKKYYYYYYYYYYYYMMMMMMMMAAAAATTTTTTTCCCCCCLLLLLLLLLLLLLLLLYYYYYYYYYYYYGGGGGGGGDDDDDDDDVVVVVVVVVVVVVVPPPPPPPNNNNNNNNDDDDDDDDAAAAAHHHHHHHHHHAAAAAAAAAAVVVVVVVAAAAASSSSSSLLLLLLLLKKKKKKKKKTTTTTTTKKKKKKKKKRRRRRRRRRRRTTTTTTTIIIIIIIIQQQQQQQQQFFFFFFFFFFFVVVVVVVDDDDDDDDWWWWWWWWWWWWWWCCCCCCPPPPPPPTTTTTTTGGGGFFFFFFFFFFFKKKKKKKKKLLLLLLLLGGGGIIIIIIIICCCCCCYYYYYYYYYYYYQQQQQQQQQPPPPPPPPPPPPPPHHHHHHHHHHQQQQQQQQQVVVVVVVPPPPPPPNNNNNNNNGGGGDDDDDDDDLLLLLLLLAAAAAKKKKKKKKKVVVVVVVNNNNNNNNRRRRRRRRRRRAAAAAVVVVVVVCCCCCCMMMMMMMMLLLLLLLLSSSSSSNNNNNNNNTTTTTTTTTTTTTTAAAAAIIIIIIIIAAAAAEEEEEEEEEAAAAAWWWWWWWWWWWWWWSSSSSSAAAAALLLLLLLLSSSSSSSSSSSSKKKKKKKKKFFFFFFFFFFFDDDDDDDDLLLLLLLLMMMMMMMMYYYYYYYYYYYYSSSSSSKKKKKKKKKRRRRRRRRRRRAAAAAFFFFFFFFFFFVVVVVVVHHHHHHHHHHWWWWWWWWWWWWWWYYYYYYYYYYYYVVVVVVVGGGGEEEEEEEEEGGGGMMMMMMMMEEEEEEEEEEEEEEEEEEGGGGEEEEEEEEEFFFFFFFFFFFSSSSSSEEEEEEEEEAAAAARRRRRRRRRRREEEEEEEEEVVVVVVVLLLLLLLLAAAAAAAAAALLLLLLLLEEEEEEEEEAAAAADDDDDDDDYYYYYYYYYYYYEEEEEEEEEEEEEEEEEEVVVVVVVAAAAAAAAAADDDDDDDDSSSSSSMMMMMMMMEEEEEEEEEGGGGEEEEEEEEEEEEEEEEEEVVVVVVVEEEEEEEEEAAAAAEEEEEEEEEYYYYYYYYYYYYY

SEQ ID NO: 97 - protein, 3482 aa, Tetrahymena pyriformis
MMMMMMMMRRRRRRRRRRREEEEEEEEEVVVVVVVIIIIIIIISSSSSSIIIIIIIIHHHHHHHHHHVVVVVVVGGGGQQQQQQQQQGGGGGGGGIIIIIIIIQQQQQQQQQVVVVVVVGGGGNNNNNNNNAAAAACCCCCCWWWWWWWWWWWWWWEEEEEEEEELLLLLLLLFFFFFFFFFFFCCCCCCLLLLLLLLEEEEEEEEEHHHHHHHHHHGGGGIIIIIIIIQQQQQQQQQPPPPPPPDDDDDDDDGGGGQQQQQQQQQMMMMMMMMPPPPPPPSSSSSSDDDDDDDDKKKKKKKKKTTTTTTTIIIIIIIIGGGGGGGGGGGGDDDDDDDDDDDDDDDDAAAAAFFFFFFFFFFFNNNNNNNNTTTTTTTFFFFFFFFFFFFFFFFFFFFFFSSSSSSEEEEEEEEETTTTTTTGGGGAAAAAGGGGKKKKKKKKKHHHHHHHHHHVVVVVVVPPPPPPPRRRRRRRRRRRAAAAAVVVVVVVFFFFFFFFFFFLLLLLLLLDDDDDDDDLLLLLLLLEEEEEEEEEPPPPPPPTTTTTTTVVVVVVVIIIIIIIIDDDDDDDDEEEEEEEEEVVVVVVVRRRRRRRRRRRTTTTTTTGGGGTTTTTTTYYYYYYYYYYYYRRRRRRRRRRRQQQQQQQQQLLLLLLLLFFFFFFFFFFFHHHHHHHHHHPPPPPPPEEEEEEEEEQQQQQQQQQLLLLLLLLIIIIIIIISSSSSSGGGGKKKKKKKKKEEEEEEEEEDDDDDDDDAAAAAAAAAANNNNNNNNNNNNNNNNFFFFFFFFFFFAAAAARRRRRRRRRRRGGGGHHHHHHHHHHYYYYYYYYYYYYTTTTTTTIIIIIIIIGGGGKKKKKKKKKEEEEEEEEEIIIIIIIIVVVVVVVDDDDDDDDLLLLLLLLCCCCCCLLLLLLLLDDDDDDDDRRRRRRRRRRRIIIIIIIIRRRRRRRRRRRKKKKKKKKKLLLLLLLLAAAAADDDDDDDDNNNNNNNNCCCCCCTTTTTTTGGGGLLLLLLLLQQQQQQQQQGGGGFFFFFFFFFFFLLLLLLLLVVVVVVVFFFFFFFFFFFNNNNNNNNSSSSSSVVVVVVVGGGGGGGGGGGGTTTTTTTGGGGSSSSSSGGGGLLLLLLLLGGGGSSSSSSLLLLLLLLLLLLLLLLLLLLLLLLEEEEEEEEERRRRRRRRRRRLLLLLLLLSSSSSSVVVVVVVDDDDDDDDYYYYYYYYYYYYGGGGKKKKKKKKKKKKKKKKKKSSSSSSKKKKKKKKKLLLLLLLLGGGGFFFFFFFFFFFTTTTTTTIIIIIIIIYYYYYYYYYYYYPPPPPPPSSSSSSPPPPPPPQQQQQQQQQVVVVVVVSSSSSSTTTTTTTAAAAAVVVVVVVVVVVVVVEEEEEEEEEPPPPPPPYYYYYYYYYYYYNNNNNNNNSSSSSSIIIIIIIILLLLLLLLSSSSSSTTTTTTTHHHHHHHHHHSSSSSSLLLLLLLLLLLLLLLLEEEEEEEEEHHHHHHHHHHTTTTTTTDDDDDDDDVVVVVVVAAAAAVVVVVVVMMMMMMMMLLLLLLLLDDDDDDDDNNNNNNNNEEEEEEEEEAAAAAIIIIIIIIYYYYYYYYYYYYDDDDDDDDIIIIIIIICCCCCCRRRRRRRRRRRRRRRRRRRRRRNNNNNNNNLLLLLLLLDDDDDDDDIIIIIIIIEEEEEEEEERRRRRRRRRRRPPPPPPPTTTTTTTYYYYYYYYYYYYTTTTTTTNNNNNNNNLLLLLLLLNNNNNNNNRRRRRRRRRRRLLLLLLLLIIIIIIIIAAAAAQQQQQQQQQVVVVVVVIIIIIIIISSSSSSSSSSSSLLLLLLLLTTTTTTTAAAAASSSSSSLLLLLLLLRRRRRRRRRRRFFFFFFFFFFFDDDDDDDDGGGGAAAAALLLLLLLLNNNNNNNNVVVVVVVDDDDDDDDIIIIIIIITTTTTTTEEEEEEEEEFFFFFFFFFFFQQQQQQQQQTTTTTTTNNNNNNNNLLLLLLLLVVVVVVVPPPPPPPYYYYYYYYYYYYPPPPPPPRRRRRRRRRRRIIIIIIIIHHHHHHHHHHFFFFFFFFFFFMMMMMMMMLLLLLLLLSSSSSSSSSSSSYYYYYYYYYYYYAAAAAPPPPPPPIIIIIIIIIIIIIIIISSSSSSAAAAAEEEEEEEEEKKKKKKKKKAAAAAYYYYYYYYYYYYHHHHHHHHHHEEEEEEEEEQQQQQQQQQLLLLLLLLSSSSSSVVVVVVVAAAAAEEEEEEEEEIIIIIIIITTTTTTTNNNNNNNNSSSSSSAAAAAFFFFFFFFFFFEEEEEEEEEPPPPPPPAAAAANNNNNNNNMMMMMMMMMMMMMMMMAAAAAKKKKKKKKKCCCCCCDDDDDDDDPPPPPPPRRRRRRRRRRRHHHHHHHHHHGGGGKKKKKKKKKYYYYYYYYYYYYMMMMMMMMAAAAACCCCCCSSSSSSMMMMMMMMMMMMMMMMYYYYYYYYYYYYRRRRRRRRRRRGGGGDDDDDDDDVVVVVVVVVVVVVVPPPPPPPKKKKKKKKKDDDDDDDDVVVVVVVNNNNNNNNAAAAASSSSSSIIIIIIIIAAAAATTTTTTTIIIIIIIIKKKKKKKKKTTTTTTTKKKKKKKKKRRRRRRRRRRRTTTTTTTIIIIIIIIQQQQQQQQQFFFFFFFFFFFVVVVVVVDDDDDDDDWWWWWWWWWWWWWWCCCCCCPPPPPPPTTTTTTTGGGGFFFFFFFFFFFKKKKKKKKKVVVVVVVGGGGIIIIIIIINNNNNNNNYYYYYYYYYYYYQQQQQQQQQPPPPPPPSSSSSSTTTTTTTVVVVVVVVVVVVVVPPPPPPPGGGGGGGGDDDDDDDDLLLLLLLLAAAAAKKKKKKKKKVVVVVVVMMMMMMMMRRRRRRRRRRRAAAAAVVVVVVVCCCCCCMMMMMMMMIIIIIIIISSSSSSNNNNNNNNSSSSSSTTTTTTTAAAAAIIIIIIIIAAAAAEEEEEEEEEVVVVVVVFFFFFFFFFFFSSSSSSRRRRRRRRRRRLLLLLLLLDDDDDDDDHHHHHHHHHHKKKKKKKKKFFFFFFFFFFFDDDDDDDDLLLLLLLLMMMMMMMMYYYYYYYYYYYYAAAAAKKKKKKKKKRRRRRRRRRRRAAAAAFFFFFFFFFFFVVVVVVVHHHHHHHHHHWWWWWWWWWWWWWWYYYYYYYYYYYYVVVVVVVGGGGEEEEEEEEEGGGGMMMMMMMMEEEEEEEEEEEEEEEEEEGGGGEEEEEEEEEFFFFFFFFFFFSSSSSSEEEEEEEEEAAAAARRRRRRRRRRREEEEEEEEEDDDDDDDDLLLLLLLLAAAAAAAAAALLLLLLLLEEEEEEEEEKKKKKKKKKDDDDDDDDYYYYYYYYYYYYEEEEEEEEEEEEEEEEEEVVVVVVVGGGGIIIIIIIIEEEEEEEEETTTTTTTAAAAAEEEEEEEEEGGGGEEEEEEEEEGGGGEEEEEEEEEEEEEEEEEEEEEEEEEEEGGGGYYYYYYYYYYYYY

SEQ ID NO: 98 - protein, 3483 aa, Tetrahymena thermophila
MMMMMMMMRRRRRRRRRRREEEEEEEEEVVVVVVVIIIIIIIISSSSSSIIIIIIIIHHHHHHHHHHVVVVVVVGGGGQQQQQQQQQGGGGGGGGIIIIIIIIQQQQQQQQQVVVVVVVGGGGNNNNNNNNAAAAACCCCCCWWWWWWWWWWWWWWEEEEEEEEELLLLLLLLFFFFFFFFFFFCCCCCCLLLLLLLLEEEEEEEEEHHHHHHHHHHGGGGIIIIIIIIQQQQQQQQQPPPPPPPDDDDDDDDGGGGQQQQQQQQQMMMMMMMMPPPPPPPSSSSSSDDDDDDDDKKKKKKKKKTTTTTTTIIIIIIIIGGGGGGGGGGGGDDDDDDDDDDDDDDDDAAAAAFFFFFFFFFFFNNNNNNNNTTTTTTTFFFFFFFFFFFFFFFFFFFFFFSSSSSSEEEEEEEEETTTTTTTGGGGAAAAAGGGGKKKKKKKKKHHHHHHHHHHVVVVVVVPPPPPPPRRRRRRRRRRRAAAAAVVVVVVVFFFFFFFFFFFLLLLLLLLDDDDDDDDLLLLLLLLEEEEEEEEEPPPPPPPTTTTTTTVVVVVVVIIIIIIIIDDDDDDDDEEEEEEEEEVVVVVVVRRRRRRRRRRRTTTTTTTGGGGTTTTTTTYYYYYYYYYYYYRRRRRRRRRRRQQQQQQQQQLLLLLLLLFFFFFFFFFFFHHHHHHHHHHPPPPPPPEEEEEEEEEQQQQQQQQQLLLLLLLLIIIIIIIISSSSSSGGGGKKKKKKKKKEEEEEEEEEDDDDDDDDAAAAAAAAAANNNNNNNNNNNNNNNNFFFFFFFFFFFAAAAARRRRRRRRRRRGGGGHHHHHHHHHHYYYYYYYYYYYYTTTTTTTIIIIIIIIGGGGKKKKKKKKKEEEEEEEEEIIIIIIIIVVVVVVVDDDDDDDDLLLLLLLLCCCCCCLLLLLLLLDDDDDDDDRRRRRRRRRRRIIIIIIIIRRRRRRRRRRRKKKKKKKKKLLLLLLLLAAAAADDDDDDDDNNNNNNNNCCCCCCTTTTTTTGGGGLLLLLLLLQQQQQQQQQGGGGFFFFFFFFFFFLLLLLLLLVVVVVVVFFFFFFFFFFFNNNNNNNNSSSSSSVVVVVVVGGGGGGGGGGGGTTTTTTTGGGGSSSSSSGGGGLLLLLLLLGGGGSSSSSSLLLLLLLLLLLLLLLLLLLLLLLLEEEEEEEEERRRRRRRRRRRLLLLLLLLSSSSSSVVVVVVVDDDDDDDDYYYYYYYYYYYYGGGGKKKKKKKKKKKKKKKKKKSSSSSSKKKKKKKKKLLLLLLLLGGGGFFFFFFFFFFFTTTTTTTIIIIIIIIYYYYYYYYYYYYPPPPPPPSSSSSSPPPPPPPQQQQQQQQQVVVVVVVSSSSSSTTTTTTTAAAAAVVVVVVVVVVVVVVEEEEEEEEEPPPPPPPYYYYYYYYYYYYNNNNNNNNSSSSSSIIIIIIIILLLLLLLLSSSSSSTTTTTTTHHHHHHHHHHSSSSSSLLLLLLLLLLLLLLLLEEEEEEEEEHHHHHHHHHHTTTTTTTDDDDDDDDVVVVVVVAAAAAVVVVVVVMMMMMMMMLLLLLLLLDDDDDDDDNNNNNNNNEEEEEEEEEAAAAAIIIIIIIIYYYYYYYYYYYYDDDDDDDDIIIIIIIICCCCCCRRRRRRRRRRRRRRRRRRRRRRNNNNNNNNLLLLLLLLDDDDDDDDIIIIIIIIEEEEEEEEERRRRRRRRRRRPPPPPPPTTTTTTTYYYYYYYYYYYYTTTTTTTNNNNNNNNLLLLLLLLNNNNNNNNRRRRRRRRRRRLLLLLLLLIIIIIIIIAAAAAQQQQQQQQQVVVVVVVIIIIIIIISSSSSSSSSSSSLLLLLLLLTTTTTTTAAAAASSSSSSLLLLLLLLRRRRRRRRRRRFFFFFFFFFFFDDDDDDDDGGGGAAAAALLLLLLLLNNNNNNNNVVVVVVVDDDDDDDDIIIIIIIITTTTTTTEEEEEEEEEFFFFFFFFFFFQQQQQQQQQTTTTTTTNNNNNNNNLLLLLLLLVVVVVVVPPPPPPPYYYYYYYYYYYYPPPPPPPRRRRRRRRRRRIIIIIIIIHHHHHHHHHHFFFFFFFFFFFMMMMMMMMLLLLLLLLSSSSSSSSSSSSYYYYYYYYYYYYAAAAAPPPPPPPIIIIIIIIIIIIIIIISSSSSSAAAAAEEEEEEEEEKKKKKKKKKAAAAAYYYYYYYYYYYYHHHHHHHHHHEEEEEEEEEQQQQQQQQQLLLLLLLLSSSSSSVVVVVVVAAAAAEEEEEEEEEIIIIIIIITTTTTTTNNNNNNNNSSSSSSAAAAAFFFFFFFFFFFEEEEEEEEEPPPPPPPAAAAANNNNNNNNMMMMMMMMMMMMMMMMAAAAAKKKKKKKKKCCCCCCDDDDDDDDPPPPPPPRRRRRRRRRRRHHHHHHHHHHGGGGKKKKKKKKKYYYYYYYYYYYYMMMMMMMMAAAAACCCCCCSSSSSSMMMMMMMMMMMMMMMMYYYYYYYYYYYYRRRRRRRRRRRGGGGDDDDDDDDVVVVVVVVVVVVVVPPPPPPPKKKKKKKKKDDDDDDDDVVVVVVVNNNNNNNNAAAAASSSSSSIIIIIIIIAAAAATTTTTTTIIIIIIIIKKKKKKKKKTTTTTTTKKKKKKKKKRRRRRRRRRRRTTTTTTTIIIIIIIIQQQQQQQQQFFFFFFFFFFFVVVVVVVDDDDDDDDWWWWWWWWWWWWWWCCCCCCPPPPPPPTTTTTTTGGGGFFFFFFFFFFFKKKKKKKKKVVVVVVVGGGGIIIIIIIINNNNNNNNYYYYYYYYYYYYQQQQQQQQQPPPPPPPPPPPPPPTTTTTTTVVVVVVVVVVVVVVPPPPPPPGGGGGGGGDDDDDDDDLLLLLLLLAAAAAKKKKKKKKKVVVVVVVMMMMMMMMRRRRRRRRRRRAAAAAVVVVVVVCCCCCCMMMMMMMMIIIIIIIISSSSSSNNNNNNNNSSSSSSTTTTTTTAAAAAIIIIIIIIAAAAAEEEEEEEEEVVVVVVVFFFFFFFFFFFSSSSSSRRRRRRRRRRRLLLLLLLLDDDDDDDDHHHHHHHHHHKKKKKKKKKFFFFFFFFFFFDDDDDDDDLLLLLLLLMMMMMMMMYYYYYYYYYYYYAAAAAKKKKKKKKKRRRRRRRRRRRAAAAAFFFFFFFFFFFVVVVVVVHHHHHHHHHHWWWWWWWWWWWWWWYYYYYYYYYYYYVVVVVVVGGGGEEEEEEEEEGGGGMMMMMMMMEEEEEEEEEEEEEEEEEEGGGGEEEEEEEEEFFFFFFFFFFFSSSSSSEEEEEEEEEAAAAARRRRRRRRRRREEEEEEEEEDDDDDDDDLLLLLLLLAAAAAAAAAALLLLLLLLEEEEEEEEEKKKKKKKKKDDDDDDDDYYYYYYYYYYYYEEEEEEEEEEEEEEEEEEVVVVVVVGGGGIIIIIIIIEEEEEEEEETTTTTTTAAAAAEEEEEEEEEGGGGEEEEEEEEEGGGGEEEEEEEEEEEEEEEEEEEEEEEEEEEGGGGYYYYYYYYYYYYY

SEQ ID NO: 99 - protein, 3513 aa, Oncorhynchus mykiss
MMMMMMMMRRRRRRRRRRREEEEEEEEECCCCCCIIIIIIIISSSSSSIIIIIIIIHHHHHHHHHHVVVVVVVGGGGQQQQQQQQQAAAAAGGGGVVVVVVVQQQQQQQQQIIIIIIIIGGGGNNNNNNNNAAAAACCCCCCWWWWWWWWWWWWWWEEEEEEEEELLLLLLLLYYYYYYYYYYYYCCCCCCLLLLLLLLEEEEEEEEEHHHHHHHHHHGGGGIIIIIIIIQQQQQQQQQPPPPPPPDDDDDDDDGGGGQQQQQQQQQMMMMMMMMPPPPPPPSSSSSSDDDDDDDDKKKKKKKKKTTTTTTTIIIIIIIIGGGGGGGGGGGGDDDDDDDDDDDDDDDDSSSSSSFFFFFFFFFFFNNNNNNNNTTTTTTTFFFFFFFFFFFFFFFFFFFFFFSSSSSSEEEEEEEEETTTTTTTGGGGAAAAAGGGGKKKKKKKKKHHHHHHHHHHVVVVVVVPPPPPPPRRRRRRRRRRRAAAAAVVVVVVVFFFFFFFFFFFVVVVVVVDDDDDDDDLLLLLLLLEEEEEEEEEPPPPPPPTTTTTTTVVVVVVVVVVVVVVDDDDDDDDEEEEEEEEEVVVVVVVRRRRRRRRRRRTTTTTTTGGGGTTTTTTTYYYYYYYYYYYYRRRRRRRRRRRQQQQQQQQQLLLLLLLLFFFFFFFFFFFHHHHHHHHHHPPPPPPPEEEEEEEEEQQQQQQQQQLLLLLLLLIIIIIIIITTTTTTTGGGGKKKKKKKKKEEEEEEEEEDDDDDDDDAAAAAAAAAANNNNNNNNNNNNNNNNYYYYYYYYYYYYAAAAARRRRRRRRRRRGGGGHHHHHHHHHHYYYYYYYYYYYYTTTTTTTIIIIIIIIGGGGKKKKKKKKKEEEEEEEEEIIIIIIIIVVVVVVVDDDDDDDDLLLLLLLLVVVVVVVLLLLLLLLDDDDDDDDRRRRRRRRRRRVVVVVVVRRRRRRRRRRRKKKKKKKKKLLLLLLLLSSSSSSDDDDDDDDQQQQQQQQQCCCCCCTTTTTTTGGGGLLLLLLLLQQQQQQQQQGGGGFFFFFFFFFFFLLLLLLLLIIIIIIIIFFFFFFFFFFFHHHHHHHHHHSSSSSSFFFFFFFFFFFGGGGGGGGGGGGTTTTTTTGGGGSSSSSSGGGGFFFFFFFFFFFAAAAASSSSSSLLLLLLLLLLLLLLLLMMMMMMMMEEEEEEEEERRRRRRRRRRRLLLLLLLLSSSSSSVVVVVVVDDDDDDDDYYYYYYYYYYYYGGGGKKKKKKKKKKKKKKKKKKSSSSSSKKKKKKKKKLLLLLLLLEEEEEEEEEFFFFFFFFFFFAAAAAIIIIIIIIYYYYYYYYYYYYPPPPPPPAAAAAPPPPPPPQQQQQQQQQVVVVVVVSSSSSSTTTTTTTAAAAAVVVVVVVVVVVVVVEEEEEEEEEPPPPPPPYYYYYYYYYYYYNNNNNNNNSSSSSSIIIIIIIILLLLLLLLTTTTTTTTTTTTTTHHHHHHHHHHTTTTTTTTTTTTTTLLLLLLLLEEEEEEEEEHHHHHHHHHHSSSSSSDDDDDDDDCCCCCCAAAAAFFFFFFFFFFFMMMMMMMMVVVVVVVDDDDDDDDNNNNNNNNEEEEEEEEEAAAAAIIIIIIIIYYYYYYYYYYYYDDDDDDDDIIIIIIIICCCCCCRRRRRRRRRRRRRRRRRRRRRRNNNNNNNNLLLLLLLLDDDDDDDDIIIIIIIIEEEEEEEEERRRRRRRRRRRPPPPPPPTTTTTTTYYYYYYYYYYYYTTTTTTTNNNNNNNNLLLLLLLLNNNNNNNNRRRRRRRRRRRLLLLLLLLIIIIIIIIGGGGQQQQQQQQQIIIIIIIIVVVVVVVSSSSSSSSSSSSIIIIIIIITTTTTTTAAAAASSSSSSLLLLLLLLRRRRRRRRRRRFFFFFFFFFFFDDDDDDDDGGGGAAAAALLLLLLLLNNNNNNNNVVVVVVVDDDDDDDDLLLLLLLLTTTTTTTEEEEEEEEEFFFFFFFFFFFQQQQQQQQQTTTTTTTNNNNNNNNLLLLLLLLVVVVVVVPPPPPPPYYYYYYYYYYYYPPPPPPPRRRRRRRRRRRIIIIIIIIHHHHHHHHHHFFFFFFFFFFFPPPPPPPLLLLLLLLVVVVVVVTTTTTTTYYYYYYYYYYYYAAAAAPPPPPPPVVVVVVVIIIIIIIISSSSSSAAAAAEEEEEEEEEKKKKKKKKKAAAAAYYYYYYYYYYYYHHHHHHHHHHEEEEEEEEEMMMMMMMMLLLLLLLLSSSSSSVVVVVVVAAAAAEEEEEEEEEIIIIIIIITTTTTTTNNNNNNNNAAAAACCCCCCFFFFFFFFFFFEEEEEEEEEPPPPPPPAAAAANNNNNNNNQQQQQQQQQMMMMMMMMVVVVVVVKKKKKKKKKCCCCCCDDDDDDDDPPPPPPPRRRRRRRRRRRHHHHHHHHHHGGGGKKKKKKKKKYYYYYYYYYYYYMMMMMMMMAAAAACCCCCCCCCCCCMMMMMMMMLLLLLLLLYYYYYYYYYYYYRRRRRRRRRRRGGGGDDDDDDDDVVVVVVVVVVVVVVPPPPPPPKKKKKKKKKDDDDDDDDVVVVVVVNNNNNNNNAAAAAAAAAAIIIIIIIIAAAAATTTTTTTIIIIIIIIKKKKKKKKKTTTTTTTKKKKKKKKKRRRRRRRRRRRTTTTTTTIIIIIIIIQQQQQQQQQFFFFFFFFFFFVVVVVVVDDDDDDDDWWWWWWWWWWWWWWCCCCCCPPPPPPPTTTTTTTGGGGFFFFFFFFFFFKKKKKKKKKVVVVVVVGGGGIIIIIIIINNNNNNNNYYYYYYYYYYYYQQQQQQQQQPPPPPPPPPPPPPPTTTTTTTVVVVVVVVVVVVVVPPPPPPPGGGGGGGGDDDDDDDDLLLLLLLLAAAAAKKKKKKKKKVVVVVVVQQQQQQQQQRRRRRRRRRRRAAAAAVVVVVVVCCCCCCMMMMMMMMLLLLLLLLSSSSSSNNNNNNNNTTTTTTTTTTTTTTAAAAAIIIIIIIIAAAAAEEEEEEEEEAAAAAWWWWWWWWWWWWWWAAAAARRRRRRRRRRRLLLLLLLLDDDDDDDDHHHHHHHHHHKKKKKKKKKFFFFFFFFFFFDDDDDDDDLLLLLLLLMMMMMMMMYYYYYYYYYYYYAAAAAKKKKKKKKKRRRRRRRRRRRAAAAAFFFFFFFFFFFVVVVVVVHHHHHHHHHHWWWWWWWWWWWWWWYYYYYYYYYYYYVVVVVVVGGGGEEEEEEEEEGGGGMMMMMMMMEEEEEEEEEEEEEEEEEEGGGGEEEEEEEEEFFFFFFFFFFFSSSSSSEEEEEEEEEAAAAARRRRRRRRRRREEEEEEEEEDDDDDDDDLLLLLLLLAAAAAAAAAALLLLLLLLEEEEEEEEEKKKKKKKKKDDDDDDDDYYYYYYYYYYYYEEEEEEEEEEEEEEEEEEVVVVVVVGGGGVVVVVVVDDDDDDDDSSSSSSVVVVVVVEEEEEEEEEGGGGEEEEEEEEEAAAAAEEEEEEEEEEEEEEEEEEGGGGEEEEEEEEEEEEEEEEEEYYYYYYYYYYYYY

SEQ ID NO: 100 - protein, 3526 aa, Torpedo marmorata
MMMMMMMMRRRRRRRRRRREEEEEEEEECCCCCCIIIIIIIISSSSSSIIIIIIIIHHHHHHHHHHVVVVVVVGGGGQQQQQQQQQAAAAAGGGGVVVVVVVQQQQQQQQQIIIIIIIIGGGGNNNNNNNNAAAAACCCCCCWWWWWWWWWWWWWWEEEEEEEEELLLLLLLLYYYYYYYYYYYYCCCCCCLLLLLLLLEEEEEEEEEHHHHHHHHHHGGGGIIIIIIIIQQQQQQQQQPPPPPPPDDDDDDDDGGGGQQQQQQQQQMMMMMMMMPPPPPPPSSSSSSDDDDDDDDKKKKKKKKKTTTTTTTIIIIIIIIGGGGGGGGGGGGDDDDDDDDDDDDDDDDSSSSSSFFFFFFFFFFFNNNNNNNNTTTTTTTFFFFFFFFFFFFFFFFFFFFFFSSSSSSEEEEEEEEETTTTTTTGGGGAAAAAGGGGKKKKKKKKKHHHHHHHHHHVVVVVVVPPPPPPPRRRRRRRRRRRAAAAAVVVVVVVFFFFFFFFFFFVVVVVVVDDDDDDDDLLLLLLLLEEEEEEEEEPPPPPPPTTTTTTTVVVVVVVIIIIIIIIDDDDDDDDEEEEEEEEEVVVVVVVRRRRRRRRRRRTTTTTTTGGGGTTTTTTTYYYYYYYYYYYYRRRRRRRRRRRQQQQQQQQQLLLLLLLLFFFFFFFFFFFHHHHHHHHHHPPPPPPPEEEEEEEEEQQQQQQQQQLLLLLLLLIIIIIIIITTTTTTTGGGGKKKKKKKKKEEEEEEEEEDDDDDDDDAAAAAAAAAANNNNNNNNNNNNNNNNYYYYYYYYYYYYAAAAARRRRRRRRRRRGGGGHHHHHHHHHHYYYYYYYYYYYYTTTTTTTIIIIIIIIGGGGKKKKKKKKKEEEEEEEEEIIIIIIIIIIIIIIIIDDDDDDDDLLLLLLLLVVVVVVVLLLLLLLLDDDDDDDDRRRRRRRRRRRIIIIIIIIRRRRRRRRRRRKKKKKKKKKLLLLLLLLAAAAADDDDDDDDQQQQQQQQQCCCCCCTTTTTTTGGGGLLLLLLLLQQQQQQQQQGGGGFFFFFFFFFFFLLLLLLLLVVVVVVVFFFFFFFFFFFHHHHHHHHHHSSSSSSFFFFFFFFFFFGGGGGGGGGGGGTTTTTTTGGGGSSSSSSGGGGFFFFFFFFFFFTTTTTTTSSSSSSLLLLLLLLLLLLLLLLMMMMMMMMEEEEEEEEERRRRRRRRRRRLLLLLLLLSSSSSSVVVVVVVDDDDDDDDYYYYYYYYYYYYGGGGKKKKKKKKKKKKKKKKKKSSSSSSKKKKKKKKKLLLLLLLLEEEEEEEEEFFFFFFFFFFFSSSSSSIIIIIIIIYYYYYYYYYYYYPPPPPPPAAAAAPPPPPPPQQQQQQQQQVVVVVVVSSSSSSTTTTTTTAAAAAVVVVVVVVVVVVVVEEEEEEEEEPPPPPPPYYYYYYYYYYYYNNNNNNNNSSSSSSIIIIIIIILLLLLLLLTTTTTTTTTTTTTTHHHHHHHHHHTTTTTTTTTTTTTTLLLLLLLLEEEEEEEEEHHHHHHHHHHSSSSSSDDDDDDDDCCCCCCAAAAAFFFFFFFFFFFMMMMMMMMVVVVVVVDDDDDDDDNNNNNNNNEEEEEEEEEAAAAAIIIIIIIIYYYYYYYYYYYYDDDDDDDDIIIIIIIICCCCCCRRRRRRRRRRRRRRRRRRRRRRNNNNNNNNLLLLLLLLDDDDDDDDIIIIIIIIEEEEEEEEERRRRRRRRRRRPPPPPPPTTTTTTTYYYYYYYYYYYYTTTTTTTNNNNNNNNLLLLLLLLNNNNNNNNRRRRRRRRRRRLLLLLLLLIIIIIIIISSSSSSQQQQQQQQQIIIIIIIIVVVVVVVSSSSSSSSSSSSIIIIIIIITTTTTTTAAAAASSSSSSLLLLLLLLRRRRRRRRRRRFFFFFFFFFFFDDDDDDDDGGGGAAAAALLLLLLLLNNNNNNNNVVVVVVVDDDDDDDDLLLLLLLLTTTTTTTEEEEEEEEEFFFFFFFFFFFQQQQQQQQQTTTTTTTNNNNNNNNLLLLLLLLVVVVVVVPPPPPPPYYYYYYYYYYYYPPPPPPPRRRRRRRRRRRIIIIIIIIHHHHHHHHHHFFFFFFFFFFFPPPPPPPLLLLLLLLAAAAATTTTTTTYYYYYYYYYYYYAAAAAPPPPPPPVVVVVVVIIIIIIIISSSSSSAAAAAEEEEEEEEEKKKKKKKKKAAAAAYYYYYYYYYYYYHHHHHHHHHHEEEEEEEEEQQQQQQQQQLLLLLLLLSSSSSSVVVVVVVSSSSSSEEEEEEEEEIIIIIIIITTTTTTTNNNNNNNNAAAAACCCCCCFFFFFFFFFFFEEEEEEEEEPPPPPPPAAAAANNNNNNNNQQQQQQQQQMMMMMMMMVVVVVVVKKKKKKKKKCCCCCCDDDDDDDDPPPPPPPRRRRRRRRRRRHHHHHHHHHHGGGGKKKKKKKKKYYYYYYYYYYYYMMMMMMMMAAAAACCCCCCCCCCCCLLLLLLLLLLLLLLLLYYYYYYYYYYYYRRRRRRRRRRRGGGGDDDDDDDDVVVVVVVVVVVVVVPPPPPPPKKKKKKKKKDDDDDDDDVVVVVVVNNNNNNNNAAAAAAAAAAIIIIIIIIAAAAATTTTTTTIIIIIIIIKKKKKKKKKTTTTTTTKKKKKKKKKRRRRRRRRRRRSSSSSSIIIIIIIIQQQQQQQQQFFFFFFFFFFFVVVVVVVDDDDDDDDWWWWWWWWWWWWWWCCCCCCPPPPPPPTTTTTTTGGGGFFFFFFFFFFFKKKKKKKKKVVVVVVVGGGGIIIIIIIINNNNNNNNYYYYYYYYYYYYQQQQQQQQQPPPPPPPPPPPPPPTTTTTTTVVVVVVVVVVVVVVPPPPPPPGGGGGGGGDDDDDDDDLLLLLLLLAAAAAKKKKKKKKKVVVVVVVQQQQQQQQQRRRRRRRRRRRAAAAAVVVVVVVCCCCCCMMMMMMMMLLLLLLLLSSSSSSNNNNNNNNTTTTTTTTTTTTTTAAAAAIIIIIIIIAAAAAEEEEEEEEEAAAAAWWWWWWWWWWWWWWAAAAARRRRRRRRRRRLLLLLLLLDDDDDDDDHHHHHHHHHHKKKKKKKKKFFFFFFFFFFFDDDDDDDDLLLLLLLLMMMMMMMMYYYYYYYYYYYYAAAAAKKKKKKKKKRRRRRRRRRRRAAAAAFFFFFFFFFFFVVVVVVVHHHHHHHHHHWWWWWWWWWWWWWWYYYYYYYYYYYYVVVVVVVGGGGEEEEEEEEEGGGGMMMMMMMMEEEEEEEEEEEEEEEEEEGGGGEEEEEEEEEFFFFFFFFFFFSSSSSSEEEEEEEEEAAAAARRRRRRRRRRREEEEEEEEEDDDDDDDDMMMMMMMMAAAAAAAAAALLLLLLLLEEEEEEEEEKKKKKKKKKDDDDDDDDYYYYYYYYYYYYEEEEEEEEEEEEEEEEEEVVVVVVVGGGGVVVVVVVDDDDDDDDSSSSSSVVVVVVVEEEEEEEEEGGGGEEEEEEEEEGGGGEEEEEEEEEEEEEEEEEEEEEEEEEEEGGGGEEEEEEEEEEEEEEEEEEYYYYYYYYYYYYY

SEQ ID NO: 101 - protein, 3515 aa, Toxoplasma gondii
MMMMMMMMRRRRRRRRRRREEEEEEEEEVVVVVVVIIIIIIIISSSSSSIIIIIIIIHHHHHHHHHHVVVVVVVGGGGQQQQQQQQQAAAAAGGGGIIIIIIIIQQQQQQQQQIIIIIIIIGGGGNNNNNNNNAAAAACCCCCCWWWWWWWWWWWWWWEEEEEEEEELLLLLLLLFFFFFFFFFFFCCCCCCLLLLLLLLEEEEEEEEEHHHHHHHHHHGGGGIIIIIIIIQQQQQQQQQPPPPPPPDDDDDDDDGGGGQQQQQQQQQMMMMMMMMPPPPPPPSSSSSSDDDDDDDDKKKKKKKKKTTTTTTTIIIIIIIIGGGGGGGGGGGGDDDDDDDDDDDDDDDDAAAAAFFFFFFFFFFFNNNNNNNNTTTTTTTFFFFFFFFFFFFFFFFFFFFFFSSSSSSEEEEEEEEETTTTTTTGGGGAAAAAGGGGKKKKKKKKKHHHHHHHHHHVVVVVVVPPPPPPPRRRRRRRRRRRCCCCCCVVVVVVVFFFFFFFFFFFLLLLLLLLDDDDDDDDLLLLLLLLEEEEEEEEEPPPPPPPTTTTTTTVVVVVVVVVVVVVVDDDDDDDDEEEEEEEEEVVVVVVVRRRRRRRRRRRTTTTTTTGGGGTTTTTTTYYYYYYYYYYYYRRRRRRRRRRRHHHHHHHHHHLLLLLLLLFFFFFFFFFFFHHHHHHHHHHPPPPPPPEEEEEEEEEQQQQQQQQQLLLLLLLLIIIIIIIISSSSSSGGGGKKKKKKKKKEEEEEEEEEDDDDDDDDAAAAAAAAAANNNNNNNNNNNNNNNNFFFFFFFFFFFAAAAARRRRRRRRRRRGGGGHHHHHHHHHHYYYYYYYYYYYYTTTTTTTIIIIIIIIGGGGKKKKKKKKKEEEEEEEEEIIIIIIIIVVVVVVVDDDDDDDDLLLLLLLLSSSSSSLLLLLLLLDDDDDDDDRRRRRRRRRRRIIIIIIIIRRRRRRRRRRRKKKKKKKKKLLLLLLLLAAAAADDDDDDDDNNNNNNNNCCCCCCTTTTTTTGGGGLLLLLLLLQQQQQQQQQGGGGFFFFFFFFFFFLLLLLLLLMMMMMMMMFFFFFFFFFFFNNNNNNNNAAAAAVVVVVVVGGGGGGGGGGGGTTTTTTTGGGGSSSSSSGGGGLLLLLLLLGGGGCCCCCCLLLLLLLLLLLLLLLLLLLLLLLLEEEEEEEEERRRRRRRRRRRLLLLLLLLSSSSSSVVVVVVVDDDDDDDDYYYYYYYYYYYYGGGGKKKKKKKKKKKKKKKKKKSSSSSSKKKKKKKKKLLLLLLLLNNNNNNNNFFFFFFFFFFFCCCCCCSSSSSSWWWWWWWWWWWWWWPPPPPPPSSSSSSPPPPPPPQQQQQQQQQVVVVVVVSSSSSSTTTTTTTAAAAAVVVVVVVVVVVVVVEEEEEEEEEPPPPPPPYYYYYYYYYYYYNNNNNNNNSSSSSSVVVVVVVLLLLLLLLSSSSSSTTTTTTTHHHHHHHHHHSSSSSSLLLLLLLLLLLLLLLLEEEEEEEEEHHHHHHHHHHTTTTTTTDDDDDDDDVVVVVVVAAAAAVVVVVVVMMMMMMMMLLLLLLLLDDDDDDDDNNNNNNNNEEEEEEEEEAAAAAIIIIIIIIYYYYYYYYYYYYDDDDDDDDIIIIIIIICCCCCCRRRRRRRRRRRRRRRRRRRRRRNNNNNNNNLLLLLLLLDDDDDDDDIIIIIIIIEEEEEEEEERRRRRRRRRRRPPPPPPPTTTTTTTYYYYYYYYYYYYTTTTTTTNNNNNNNNLLLLLLLLNNNNNNNNRRRRRRRRRRRLLLLLLLLIIIIIIIIAAAAAQQQQQQQQQVVVVVVVIIIIIIIISSSSSSSSSSSSLLLLLLLLTTTTTTTAAAAASSSSSSLLLLLLLLRRRRRRRRRRRFFFFFFFFFFFDDDDDDDDGGGGAAAAALLLLLLLLNNNNNNNNVVVVVVVDDDDDDDDVVVVVVVTTTTTTTEEEEEEEEEFFFFFFFFFFFQQQQQQQQQTTTTTTTNNNNNNNNLLLLLLLLVVVVVVVPPPPPPPYYYYYYYYYYYYPPPPPPPRRRRRRRRRRRIIIIIIIIHHHHHHHHHHFFFFFFFFFFFMMMMMMMMLLLLLLLLSSSSSSSSSSSSYYYYYYYYYYYYAAAAAPPPPPPPIIIIIIIIIIIIIIIISSSSSSAAAAAEEEEEEEEEKKKKKKKKKAAAAAYYYYYYYYYYYYHHHHHHHHHHEEEEEEEEEQQQQQQQQQLLLLLLLLSSSSSSVVVVVVVAAAAAEEEEEEEEEIIIIIIIITTTTTTTNNNNNNNNSSSSSSAAAAAFFFFFFFFFFFEEEEEEEEEPPPPPPPAAAAASSSSSSMMMMMMMMMMMMMMMMAAAAAKKKKKKKKKCCCCCCDDDDDDDDPPPPPPPRRRRRRRRRRRHHHHHHHHHHGGGGKKKKKKKKKYYYYYYYYYYYYMMMMMMMMAAAAACCCCCCCCCCCCLLLLLLLLMMMMMMMMYYYYYYYYYYYYRRRRRRRRRRRGGGGDDDDDDDDVVVVVVVVVVVVVVPPPPPPPKKKKKKKKKDDDDDDDDVVVVVVVNNNNNNNNAAAAAAAAAAVVVVVVVAAAAATTTTTTTIIIIIIIIKKKKKKKKKTTTTTTTKKKKKKKKKRRRRRRRRRRRTTTTTTTIIIIIIIIQQQQQQQQQFFFFFFFFFFFVVVVVVVDDDDDDDDWWWWWWWWWWWWWWCCCCCCPPPPPPPTTTTTTTGGGGFFFFFFFFFFFKKKKKKKKKCCCCCCGGGGIIIIIIIINNNNNNNNYYYYYYYYYYYYQQQQQQQQQPPPPPPPPPPPPPPTTTTTTTVVVVVVVVVVVVVVPPPPPPPGGGGGGGGDDDDDDDDLLLLLLLLAAAAAKKKKKKKKKVVVVVVVMMMMMMMMRRRRRRRRRRRAAAAAVVVVVVVCCCCCCMMMMMMMMIIIIIIIISSSSSSNNNNNNNNSSSSSSTTTTTTTAAAAAIIIIIIIIAAAAAEEEEEEEEEVVVVVVVFFFFFFFFFFFSSSSSSRRRRRRRRRRRMMMMMMMMDDDDDDDDHHHHHHHHHHKKKKKKKKKFFFFFFFFFFFDDDDDDDDLLLLLLLLMMMMMMMMYYYYYYYYYYYYAAAAAKKKKKKKKKRRRRRRRRRRRAAAAAFFFFFFFFFFFVVVVVVVHHHHHHHHHHWWWWWWWWWWWWWWYYYYYYYYYYYYVVVVVVVGGGGEEEEEEEEEGGGGMMMMMMMMEEEEEEEEEEEEEEEEEEGGGGEEEEEEEEEFFFFFFFFFFFSSSSSSEEEEEEEEEAAAAARRRRRRRRRRREEEEEEEEEDDDDDDDDLLLLLLLLAAAAAAAAAALLLLLLLLEEEEEEEEEKKKKKKKKKDDDDDDDDYYYYYYYYYYYYEEEEEEEEEEEEEEEEEEVVVVVVVGGGGIIIIIIIIEEEEEEEEETTTTTTTAAAAAEEEEEEEEEGGGGEEEEEEEEEGGGGEEEEEEEEEEEEEEEEEEEEEEEEEEEGGGGYYYYYYYYYYYYGGGGDDDDDDDDEEEEEEEEEYYYYYYYYYYYYY

SEQ ID NO: 102 - protein, 3497 aa, Trypanosoma brucei
MMMMMMMMRRRRRRRRRRREEEEEEEEEAAAAAIIIIIIIICCCCCCIIIIIIIIHHHHHHHHHHIIIIIIIIGGGGQQQQQQQQQAAAAAGGGGCCCCCCQQQQQQQQQVVVVVVVGGGGNNNNNNNNAAAAACCCCCCWWWWWWWWWWWWWWEEEEEEEEELLLLLLLLFFFFFFFFFFFCCCCCCLLLLLLLLEEEEEEEEEHHHHHHHHHHGGGGIIIIIIIIQQQQQQQQQPPPPPPPDDDDDDDDGGGGAAAAAMMMMMMMMPPPPPPPSSSSSSDDDDDDDDKKKKKKKKKTTTTTTTIIIIIIIIGGGGVVVVVVVEEEEEEEEEDDDDDDDDDDDDDDDDAAAAAFFFFFFFFFFFNNNNNNNNTTTTTTTFFFFFFFFFFFFFFFFFFFFFFSSSSSSEEEEEEEEETTTTTTTGGGGAAAAAGGGGKKKKKKKKKHHHHHHHHHHVVVVVVVPPPPPPPRRRRRRRRRRRAAAAAVVVVVVVFFFFFFFFFFFLLLLLLLLDDDDDDDDLLLLLLLLEEEEEEEEEPPPPPPPTTTTTTTVVVVVVVVVVVVVVDDDDDDDDEEEEEEEEEVVVVVVVRRRRRRRRRRRTTTTTTTGGGGTTTTTTTYYYYYYYYYYYYRRRRRRRRRRRQQQQQQQQQLLLLLLLLFFFFFFFFFFFHHHHHHHHHHPPPPPPPEEEEEEEEEQQQQQQQQQLLLLLLLLIIIIIIIISSSSSSGGGGKKKKKKKKKEEEEEEEEEDDDDDDDDAAAAAAAAAANNNNNNNNNNNNNNNNYYYYYYYYYYYYAAAAARRRRRRRRRRRGGGGHHHHHHHHHHYYYYYYYYYYYYTTTTTTTIIIIIIIIGGGGKKKKKKKKKEEEEEEEEEIIIIIIIIVVVVVVVDDDDDDDDLLLLLLLLCCCCCCLLLLLLLLDDDDDDDDRRRRRRRRRRRIIIIIIIIRRRRRRRRRRRKKKKKKKKKLLLLLLLLAAAAADDDDDDDDNNNNNNNNCCCCCCTTTTTTTGGGGLLLLLLLLQQQQQQQQQGGGGFFFFFFFFFFFLLLLLLLLVVVVVVVYYYYYYYYYYYYHHHHHHHHHHAAAAAVVVVVVVGGGGGGGGGGGGTTTTTTTGGGGSSSSSSGGGGLLLLLLLLGGGGAAAAALLLLLLLLLLLLLLLLLLLLLLLLEEEEEEEEERRRRRRRRRRRLLLLLLLLSSSSSSVVVVVVVDDDDDDDDYYYYYYYYYYYYGGGGKKKKKKKKKKKKKKKKKKSSSSSSKKKKKKKKKLLLLLLLLGGGGYYYYYYYYYYYYTTTTTTTVVVVVVVYYYYYYYYYYYYPPPPPPPSSSSSSPPPPPPPQQQQQQQQQVVVVVVVSSSSSSTTTTTTTAAAAAVVVVVVVVVVVVVVEEEEEEEEEPPPPPPPYYYYYYYYYYYYNNNNNNNNSSSSSSVVVVVVVLLLLLLLLSSSSSSTTTTTTTHHHHHHHHHHSSSSSSLLLLLLLLLLLLLLLLEEEEEEEEEHHHHHHHHHHTTTTTTTDDDDDDDDVVVVVVVAAAAAAAAAAMMMMMMMMLLLLLLLLDDDDDDDDNNNNNNNNEEEEEEEEEAAAAAIIIIIIIIYYYYYYYYYYYYDDDDDDDDLLLLLLLLTTTTTTTRRRRRRRRRRRRRRRRRRRRRRNNNNNNNNLLLLLLLLDDDDDDDDIIIIIIIIEEEEEEEEERRRRRRRRRRRPPPPPPPTTTTTTTYYYYYYYYYYYYTTTTTTTNNNNNNNNLLLLLLLLNNNNNNNNRRRRRRRRRRRLLLLLLLLIIIIIIIIGGGGQQQQQQQQQVVVVVVVVVVVVVVSSSSSSSSSSSSLLLLLLLLTTTTTTTAAAAASSSSSSLLLLLLLLRRRRRRRRRRRFFFFFFFFFFFDDDDDDDDGGGGAAAAALLLLLLLLNNNNNNNNVVVVVVVDDDDDDDDLLLLLLLLTTTTTTTEEEEEEEEEFFFFFFFFFFFQQQQQQQQQTTTTTTTNNNNNNNNLLLLLLLLVVVVVVVPPPPPPPYYYYYYYYYYYYPPPPPPPRRRRRRRRRRRIIIIIIIIHHHHHHHHHHFFFFFFFFFFFVVVVVVVLLLLLLLLTTTTTTTSSSSSSYYYYYYYYYYYYAAAAAPPPPPPPVVVVVVVIIIIIIIISSSSSSAAAAAEEEEEEEEEKKKKKKKKKAAAAAYYYYYYYYYYYYHHHHHHHHHHEEEEEEEEEQQQQQQQQQLLLLLLLLSSSSSSVVVVVVVSSSSSSEEEEEEEEEIIIIIIIISSSSSSNNNNNNNNAAAAAVVVVVVVFFFFFFFFFFFEEEEEEEEEPPPPPPPAAAAASSSSSSMMMMMMMMMMMMMMMMTTTTTTTKKKKKKKKKCCCCCCDDDDDDDDPPPPPPPRRRRRRRRRRRHHHHHHHHHHGGGGKKKKKKKKKYYYYYYYYYYYYMMMMMMMMAAAAACCCCCCCCCCCCLLLLLLLLMMMMMMMMYYYYYYYYYYYYRRRRRRRRRRRGGGGDDDDDDDDVVVVVVVVVVVVVVPPPPPPPKKKKKKKKKDDDDDDDDVVVVVVVNNNNNNNNAAAAAAAAAAVVVVVVVAAAAATTTTTTTIIIIIIIIKKKKKKKKKTTTTTTTKKKKKKKKKRRRRRRRRRRRTTTTTTTIIIIIIIIQQQQQQQQQFFFFFFFFFFFVVVVVVVDDDDDDDDWWWWWWWWWWWWWWSSSSSSPPPPPPPTTTTTTTGGGGFFFFFFFFFFFKKKKKKKKKCCCCCCGGGGIIIIIIIINNNNNNNNYYYYYYYYYYYYQQQQQQQQQPPPPPPPPPPPPPPTTTTTTTVVVVVVVVVVVVVVPPPPPPPGGGGGGGGDDDDDDDDLLLLLLLLAAAAAKKKKKKKKKVVVVVVVQQQQQQQQQRRRRRRRRRRRAAAAAVVVVVVVCCCCCCMMMMMMMMIIIIIIIIAAAAANNNNNNNNSSSSSSTTTTTTTAAAAAIIIIIIIIAAAAAEEEEEEEEEVVVVVVVFFFFFFFFFFFAAAAARRRRRRRRRRRIIIIIIIIDDDDDDDDHHHHHHHHHHKKKKKKKKKFFFFFFFFFFFDDDDDDDDLLLLLLLLMMMMMMMMYYYYYYYYYYYYSSSSSSKKKKKKKKKRRRRRRRRRRRAAAAAFFFFFFFFFFFVVVVVVVHHHHHHHHHHWWWWWWWWWWWWWWYYYYYYYYYYYYVVVVVVVGGGGEEEEEEEEEGGGGMMMMMMMMEEEEEEEEEEEEEEEEEEGGGGEEEEEEEEEFFFFFFFFFFFSSSSSSEEEEEEEEEAAAAARRRRRRRRRRREEEEEEEEEDDDDDDDDLLLLLLLLAAAAAAAAAALLLLLLLLEEEEEEEEEKKKKKKKKKDDDDDDDDYYYYYYYYYYYYEEEEEEEEEEEEEEEEEEVVVVVVVGGGGAAAAAEEEEEEEEESSSSSSAAAAADDDDDDDDMMMMMMMMDDDDDDDDGGGGEEEEEEEEEEEEEEEEEEDDDDDDDDVVVVVVVEEEEEEEEEEEEEEEEEEYYYYYYYYYYYYY

SEQ ID NO: 103 - protein, 3493 aa, Trypanosoma cruzi
MMMMMMMMRRRRRRRRRRREEEEEEEEEAAAAAIIIIIIIICCCCCCIIIIIIIIHHHHHHHHHHIIIIIIIIGGGGQQQQQQQQQAAAAAGGGGCCCCCCQQQQQQQQQVVVVVVVGGGGNNNNNNNNAAAAACCCCCCWWWWWWWWWWWWWWEEEEEEEEELLLLLLLLFFFFFFFFFFFCCCCCCLLLLLLLLEEEEEEEEEHHHHHHHHHHGGGGIIIIIIIIQQQQQQQQQPPPPPPPDDDDDDDDGGGGAAAAAMMMMMMMMPPPPPPPSSSSSSDDDDDDDDKKKKKKKKKTTTTTTTIIIIIIIIGGGGVVVVVVVEEEEEEEEEDDDDDDDDDDDDDDDDAAAAAFFFFFFFFFFFNNNNNNNNTTTTTTTFFFFFFFFFFFFFFFFFFFFFFSSSSSSEEEEEEEEETTTTTTTGGGGAAAAAGGGGKKKKKKKKKHHHHHHHHHHVVVVVVVPPPPPPPRRRRRRRRRRRAAAAAVVVVVVVFFFFFFFFFFFLLLLLLLLDDDDDDDDLLLLLLLLEEEEEEEEEPPPPPPPTTTTTTTVVVVVVVVVVVVVVDDDDDDDDEEEEEEEEEIIIIIIIIRRRRRRRRRRRTTTTTTTGGGGTTTTTTTYYYYYYYYYYYYRRRRRRRRRRRQQQQQQQQQLLLLLLLLFFFFFFFFFFFHHHHHHHHHHPPPPPPPEEEEEEEEEQQQQQQQQQLLLLLLLLIIIIIIIISSSSSSGGGGKKKKKKKKKEEEEEEEEEDDDDDDDDAAAAAAAAAANNNNNNNNNNNNNNNNYYYYYYYYYYYYAAAAARRRRRRRRRRRGGGGHHHHHHHHHHYYYYYYYYYYYYTTTTTTTIIIIIIIIGGGGKKKKKKKKKEEEEEEEEEIIIIIIIIVVVVVVVDDDDDDDDLLLLLLLLCCCCCCLLLLLLLLDDDDDDDDRRRRRRRRRRRIIIIIIIIRRRRRRRRRRRKKKKKKKKKLLLLLLLLAAAAADDDDDDDDNNNNNNNNCCCCCCTTTTTTTGGGGLLLLLLLLQQQQQQQQQGGGGFFFFFFFFFFFLLLLLLLLVVVVVVVYYYYYYYYYYYYHHHHHHHHHHAAAAAVVVVVVVGGGGGGGGGGGGTTTTTTTGGGGSSSSSSGGGGLLLLLLLLGGGGAAAAALLLLLLLLLLLLLLLLLLLLLLLLEEEEEEEEERRRRRRRRRRRLLLLLLLLSSSSSSVVVVVVVDDDDDDDDYYYYYYYYYYYYGGGGKKKKKKKKKKKKKKKKKKSSSSSSKKKKKKKKKLLLLLLLLGGGGYYYYYYYYYYYYTTTTTTTVVVVVVVYYYYYYYYYYYYPPPPPPPSSSSSSPPPPPPPQQQQQQQQQVVVVVVVSSSSSSTTTTTTTAAAAAVVVVVVVVVVVVVVEEEEEEEEEPPPPPPPYYYYYYYYYYYYNNNNNNNNSSSSSSVVVVVVVLLLLLLLLSSSSSSTTTTTTTHHHHHHHHHHSSSSSSLLLLLLLLLLLLLLLLEEEEEEEEEHHHHHHHHHHTTTTTTTDDDDDDDDVVVVVVVAAAAAAAAAAMMMMMMMMLLLLLLLLDDDDDDDDNNNNNNNNEEEEEEEEEAAAAAIIIIIIIIYYYYYYYYYYYYDDDDDDDDLLLLLLLLTTTTTTTRRRRRRRRRRRAAAAANNNNNNNNLLLLLLLLDDDDDDDDIIIIIIIIEEEEEEEEERRRRRRRRRRRPPPPPPPTTTTTTTYYYYYYYYYYYYTTTTTTTNNNNNNNNLLLLLLLLNNNNNNNNRRRRRRRRRRRLLLLLLLLIIIIIIIIGGGGQQQQQQQQQVVVVVVVVVVVVVVSSSSSSAAAAALLLLLLLLTTTTTTTAAAAASSSSSSLLLLLLLLRRRRRRRRRRRFFFFFFFFFFFDDDDDDDDGGGGAAAAALLLLLLLLNNNNNNNNVVVVVVVDDDDDDDDLLLLLLLLTTTTTTTEEEEEEEEEFFFFFFFFFFFQQQQQQQQQTTTTTTTNNNNNNNNLLLLLLLLVVVVVVVPPPPPPPYYYYYYYYYYYYPPPPPPPRRRRRRRRRRRIIIIIIIIHHHHHHHHHHFFFFFFFFFFFVVVVVVVLLLLLLLLTTTTTTTTTTTTTTYYYYYYYYYYYYAAAAAPPPPPPPVVVVVVVIIIIIIIISSSSSSAAAAAEEEEEEEEEKKKKKKKKKAAAAAYYYYYYYYYYYYHHHHHHHHHHEEEEEEEEEQQQQQQQQQLLLLLLLLSSSSSSVVVVVVVSSSSSSEEEEEEEEEIIIIIIIISSSSSSNNNNNNNNAAAAAVVVVVVVFFFFFFFFFFFEEEEEEEEEPPPPPPPAAAAASSSSSSMMMMMMMMMMMMMMMMTTTTTTTKKKKKKKKKCCCCCCDDDDDDDDPPPPPPPRRRRRRRRRRRHHHHHHHHHHGGGGKKKKKKKKKYYYYYYYYYYYYMMMMMMMMAAAAACCCCCCCCCCCCLLLLLLLLMMMMMMMMYYYYYYYYYYYYRRRRRRRRRRRGGGGDDDDDDDDVVVVVVVVVVVVVVPPPPPPPKKKKKKKKKDDDDDDDDVVVVVVVNNNNNNNNAAAAAAAAAAVVVVVVVAAAAATTTTTTTIIIIIIIIKKKKKKKKKTTTTTTTKKKKKKKKKRRRRRRRRRRRTTTTTTTIIIIIIIIQQQQQQQQQFFFFFFFFFFFVVVVVVVDDDDDDDDWWWWWWWWWWWWWWSSSSSSPPPPPPPTTTTTTTGGGGFFFFFFFFFFFKKKKKKKKKCCCCCCGGGGIIIIIIIINNNNNNNNYYYYYYYYYYYYQQQQQQQQQPPPPPPPPPPPPPPTTTTTTTVVVVVVVVVVVVVVPPPPPPPGGGGGGGGDDDDDDDDLLLLLLLLAAAAAKKKKKKKKKVVVVVVVQQQQQQQQQRRRRRRRRRRRAAAAAVVVVVVVCCCCCCMMMMMMMMIIIIIIIIAAAAANNNNNNNNSSSSSSTTTTTTTAAAAAIIIIIIIIAAAAAEEEEEEEEEVVVVVVVFFFFFFFFFFFAAAAARRRRRRRRRRRIIIIIIIIDDDDDDDDHHHHHHHHHHKKKKKKKKKFFFFFFFFFFFDDDDDDDDLLLLLLLLMMMMMMMMYYYYYYYYYYYYSSSSSSKKKKKKKKKRRRRRRRRRRRAAAAAFFFFFFFFFFFVVVVVVVHHHHHHHHHHWWWWWWWWWWWWWWYYYYYYYYYYYYVVVVVVVGGGGEEEEEEEEEGGGGMMMMMMMMEEEEEEEEEEEEEEEEEEGGGGEEEEEEEEEFFFFFFFFFFFSSSSSSEEEEEEEEEAAAAARRRRRRRRRRREEEEEEEEEDDDDDDDDLLLLLLLLAAAAAAAAAALLLLLLLLEEEEEEEEEKKKKKKKKKDDDDDDDDYYYYYYYYYYYYEEEEEEEEEEEEEEEEEEVVVVVVVGGGGAAAAAEEEEEEEEESSSSSSAAAAADDDDDDDDMMMMMMMMEEEEEEEEEGGGGEEEEEEEEEEEEEEEEEEDDDDDDDDVVVVVVVEEEEEEEEEEEEEEEEEEYYYYYYYYYYYYY

SEQ ID NO: 104 - protein, 3494 aa, Triticum aestivum
MMMMMMMMRRRRRRRRRRREEEEEEEEECCCCCCIIIIIIIISSSSSSIIIIIIIIHHHHHHHHHHIIIIIIIIGGGGQQQQQQQQQAAAAAGGGGIIIIIIIIQQQQQQQQQVVVVVVVGGGGNNNNNNNNAAAAACCCCCCWWWWWWWWWWWWWWEEEEEEEEELLLLLLLLYYYYYYYYYYYYCCCCCCLLLLLLLLEEEEEEEEEHHHHHHHHHHGGGGIIIIIIIIQQQQQQQQQPPPPPPPDDDDDDDDGGGGQQQQQQQQQMMMMMMMMPPPPPPPGGGGDDDDDDDDKKKKKKKKKTTTTTTTVVVVVVVGGGGGGGGGGGGDDDDDDDDDDDDDDDDAAAAAFFFFFFFFFFFNNNNNNNNTTTTTTTFFFFFFFFFFFFFFFFFFFFFFSSSSSSEEEEEEEEETTTTTTTGGGGAAAAAGGGGKKKKKKKKKHHHHHHHHHHVVVVVVVPPPPPPPRRRRRRRRRRRAAAAAVVVVVVVFFFFFFFFFFFVVVVVVVDDDDDDDDLLLLLLLLEEEEEEEEEPPPPPPPTTTTTTTVVVVVVVIIIIIIIIDDDDDDDDEEEEEEEEEVVVVVVVRRRRRRRRRRRTTTTTTTGGGGAAAAAYYYYYYYYYYYYRRRRRRRRRRRQQQQQQQQQLLLLLLLLFFFFFFFFFFFHHHHHHHHHHPPPPPPPEEEEEEEEEQQQQQQQQQLLLLLLLLIIIIIIIISSSSSSGGGGKKKKKKKKKEEEEEEEEEDDDDDDDDAAAAAAAAAANNNNNNNNNNNNNNNNFFFFFFFFFFFAAAAARRRRRRRRRRRGGGGHHHHHHHHHHYYYYYYYYYYYYTTTTTTTIIIIIIIIGGGGKKKKKKKKKEEEEEEEEEIIIIIIIIVVVVVVVDDDDDDDDLLLLLLLLCCCCCCLLLLLLLLDDDDDDDDRRRRRRRRRRRIIIIIIIIRRRRRRRRRRRKKKKKKKKKLLLLLLLLSSSSSSDDDDDDDDNNNNNNNNCCCCCCTTTTTTTGGGGLLLLLLLLQQQQQQQQQGGGGFFFFFFFFFFFLLLLLLLLVVVVVVVFFFFFFFFFFFNNNNNNNNAAAAAVVVVVVVGGGGGGGGGGGGTTTTTTTGGGGSSSSSSGGGGLLLLLLLLGGGGSSSSSSLLLLLLLLLLLLLLLLLLLLLLLLEEEEEEEEERRRRRRRRRRRLLLLLLLLSSSSSSVVVVVVVDDDDDDDDYYYYYYYYYYYYGGGGRRRRRRRRRRRKKKKKKKKKSSSSSSKKKKKKKKKLLLLLLLLGGGGFFFFFFFFFFFTTTTTTTVVVVVVVYYYYYYYYYYYYPPPPPPPSSSSSSPPPPPPPQQQQQQQQQVVVVVVVSSSSSSTTTTTTTSSSSSSVVVVVVVVVVVVVVEEEEEEEEEPPPPPPPYYYYYYYYYYYYNNNNNNNNSSSSSSVVVVVVVLLLLLLLLSSSSSSTTTTTTTHHHHHHHHHHSSSSSSLLLLLLLLLLLLLLLLEEEEEEEEEHHHHHHHHHHTTTTTTTDDDDDDDDVVVVVVVSSSSSSIIIIIIIILLLLLLLLLLLLLLLLDDDDDDDDNNNNNNNNEEEEEEEEEAAAAAIIIIIIIIYYYYYYYYYYYYDDDDDDDDIIIIIIIICCCCCCRRRRRRRRRRRRRRRRRRRRRRSSSSSSLLLLLLLLDDDDDDDDIIIIIIIIEEEEEEEEERRRRRRRRRRRPPPPPPPTTTTTTTYYYYYYYYYYYYTTTTTTTNNNNNNNNLLLLLLLLNNNNNNNNRRRRRRRRRRRLLLLLLLLVVVVVVVSSSSSSQQQQQQQQQVVVVVVVIIIIIIIISSSSSSSSSSSSLLLLLLLLTTTTTTTAAAAASSSSSSLLLLLLLLRRRRRRRRRRRFFFFFFFFFFFDDDDDDDDGGGGAAAAALLLLLLLLNNNNNNNNVVVVVVVDDDDDDDDVVVVVVVNNNNNNNNEEEEEEEEEFFFFFFFFFFFQQQQQQQQQTTTTTTTNNNNNNNNLLLLLLLLVVVVVVVPPPPPPPYYYYYYYYYYYYPPPPPPPRRRRRRRRRRRIIIIIIIIHHHHHHHHHHFFFFFFFFFFFMMMMMMMMLLLLLLLLSSSSSSSSSSSSYYYYYYYYYYYYAAAAAPPPPPPPVVVVVVVIIIIIIIISSSSSSAAAAAEEEEEEEEEKKKKKKKKKAAAAAYYYYYYYYYYYYHHHHHHHHHHEEEEEEEEEQQQQQQQQQLLLLLLLLSSSSSSVVVVVVVAAAAAEEEEEEEEEIIIIIIIITTTTTTTNNNNNNNNSSSSSSAAAAAFFFFFFFFFFFEEEEEEEEEPPPPPPPSSSSSSSSSSSSMMMMMMMMMMMMMMMMAAAAAKKKKKKKKKCCCCCCDDDDDDDDPPPPPPPRRRRRRRRRRRHHHHHHHHHHGGGGKKKKKKKKKYYYYYYYYYYYYMMMMMMMMAAAAACCCCCCCCCCCCLLLLLLLLMMMMMMMMYYYYYYYYYYYYRRRRRRRRRRRGGGGDDDDDDDDVVVVVVVVVVVVVVPPPPPPPKKKKKKKKKDDDDDDDDVVVVVVVNNNNNNNNAAAAAAAAAAVVVVVVVAAAAATTTTTTTIIIIIIIIKKKKKKKKKTTTTTTTKKKKKKKKKRRRRRRRRRRRTTTTTTTIIIIIIIIQQQQQQQQQFFFFFFFFFFFVVVVVVVDDDDDDDDWWWWWWWWWWWWWWCCCCCCPPPPPPPTTTTTTTGGGGFFFFFFFFFFFKKKKKKKKKCCCCCCGGGGIIIIIIIINNNNNNNNYYYYYYYYYYYYQQQQQQQQQPPPPPPPPPPPPPPGGGGVVVVVVVVVVVVVVPPPPPPPGGGGGGGGDDDDDDDDLLLLLLLLAAAAAKKKKKKKKKVVVVVVVQQQQQQQQQRRRRRRRRRRRAAAAAVVVVVVVCCCCCCMMMMMMMMIIIIIIIISSSSSSNNNNNNNNSSSSSSTTTTTTTSSSSSSVVVVVVVVVVVVVVEEEEEEEEEVVVVVVVFFFFFFFFFFFSSSSSSRRRRRRRRRRRIIIIIIIIDDDDDDDDHHHHHHHHHHKKKKKKKKKFFFFFFFFFFFDDDDDDDDLLLLLLLLMMMMMMMMYYYYYYYYYYYYAAAAAKKKKKKKKKRRRRRRRRRRRAAAAAFFFFFFFFFFFVVVVVVVHHHHHHHHHHWWWWWWWWWWWWWWYYYYYYYYYYYYVVVVVVVGGGGEEEEEEEEEGGGGMMMMMMMMEEEEEEEEEEEEEEEEEEGGGGEEEEEEEEEFFFFFFFFFFFSSSSSSEEEEEEEEEAAAAARRRRRRRRRRREEEEEEEEEDDDDDDDDLLLLLLLLAAAAAAAAAALLLLLLLLEEEEEEEEEKKKKKKKKKDDDDDDDDYYYYYYYYYYYYEEEEEEEEEEEEEEEEEEVVVVVVVGGGGAAAAAEEEEEEEEEFFFFFFFFFFFDDDDDDDDEEEEEEEEEGGGGEEEEEEEEEDDDDDDDDGGGGDDDDDDDDEEEEEEEEEGGGGDDDDDDDDEEEEEEEEEYYYYYYYYYYYYY

SEQ ID NO: 105 - protein, 3506 aa, Xenopus laevis
MMMMMMMMRRRRRRRRRRREEEEEEEEECCCCCCIIIIIIIISSSSSSIIIIIIIIHHHHHHHHHHVVVVVVVGGGGQQQQQQQQQAAAAAGGGGVVVVVVVQQQQQQQQQIIIIIIIIGGGGNNNNNNNNAAAAACCCCCCWWWWWWWWWWWWWWEEEEEEEEELLLLLLLLYYYYYYYYYYYYCCCCCCLLLLLLLLEEEEEEEEEHHHHHHHHHHGGGGIIIIIIIIQQQQQQQQQPPPPPPPDDDDDDDDGGGGQQQQQQQQQMMMMMMMMPPPPPPPSSSSSSDDDDDDDDKKKKKKKKKTTTTTTTIIIIIIIIGGGGGGGGGGGGDDDDDDDDDDDDDDDDSSSSSSFFFFFFFFFFFNNNNNNNNTTTTTTTFFFFFFFFFFFFFFFFFFFFFFSSSSSSEEEEEEEEETTTTTTTGGGGAAAAAGGGGKKKKKKKKKHHHHHHHHHHVVVVVVVPPPPPPPRRRRRRRRRRRAAAAAVVVVVVVFFFFFFFFFFFVVVVVVVDDDDDDDDLLLLLLLLEEEEEEEEEPPPPPPPTTTTTTTVVVVVVVIIIIIIIIDDDDDDDDEEEEEEEEEVVVVVVVRRRRRRRRRRRTTTTTTTGGGGTTTTTTTYYYYYYYYYYYYRRRRRRRRRRRQQQQQQQQQLLLLLLLLFFFFFFFFFFFHHHHHHHHHHPPPPPPPEEEEEEEEEQQQQQQQQQLLLLLLLLIIIIIIIITTTTTTTGGGGKKKKKKKKKEEEEEEEEEDDDDDDDDAAAAAAAAAANNNNNNNNNNNNNNNNYYYYYYYYYYYYAAAAARRRRRRRRRRRGGGGHHHHHHHHHHYYYYYYYYYYYYTTTTTTTIIIIIIIIGGGGKKKKKKKKKEEEEEEEEEIIIIIIIIIIIIIIIIDDDDDDDDLLLLLLLLVVVVVVVLLLLLLLLDDDDDDDDRRRRRRRRRRRIIIIIIIIRRRRRRRRRRRKKKKKKKKKLLLLLLLLAAAAADDDDDDDDQQQQQQQQQCCCCCCTTTTTTTGGGGLLLLLLLLQQQQQQQQQGGGGFFFFFFFFFFFLLLLLLLLVVVVVVVFFFFFFFFFFFHHHHHHHHHHSSSSSSFFFFFFFFFFFGGGGGGGGGGGGTTTTTTTGGGGSSSSSSGGGGFFFFFFFFFFFTTTTTTTSSSSSSLLLLLLLLLLLLLLLLLLLLLLLLEEEEEEEEERRRRRRRRRRRLLLLLLLLSSSSSSVVVVVVVDDDDDDDDYYYYYYYYYYYYGGGGKKKKKKKKKKKKKKKKKKSSSSSSKKKKKKKKKLLLLLLLLEEEEEEEEEFFFFFFFFFFFAAAAAIIIIIIIIYYYYYYYYYYYYPPPPPPPAAAAAPPPPPPPQQQQQQQQQVVVVVVVSSSSSSTTTTTTTAAAAAVVVVVVVVVVVVVVEEEEEEEEEPPPPPPPYYYYYYYYYYYYNNNNNNNNSSSSSSIIIIIIIILLLLLLLLTTTTTTTTTTTTTTHHHHHHHHHHTTTTTTTTTTTTTTLLLLLLLLEEEEEEEEEHHHHHHHHHHSSSSSSDDDDDDDDCCCCCCAAAAAFFFFFFFFFFFMMMMMMMMVVVVVVVDDDDDDDDNNNNNNNNEEEEEEEEEAAAAAIIIIIIIIYYYYYYYYYYYYDDDDDDDDIIIIIIIICCCCCCRRRRRRRRRRRRRRRRRRRRRRNNNNNNNNLLLLLLLLDDDDDDDDIIIIIIIIEEEEEEEEERRRRRRRRRRRPPPPPPPTTTTTTTYYYYYYYYYYYYTTTTTTTNNNNNNNNLLLLLLLLNNNNNNNNRRRRRRRRRRRLLLLLLLLIIIIIIIISSSSSSQQQQQQQQQIIIIIIIIVVVVVVVSSSSSSSSSSSSIIIIIIIITTTTTTTAAAAASSSSSSLLLLLLLLRRRRRRRRRRRFFFFFFFFFFFDDDDDDDDGGGGAAAAALLLLLLLLNNNNNNNNVVVVVVVDDDDDDDDLLLLLLLLTTTTTTTEEEEEEEEEFFFFFFFFFFFQQQQQQQQQTTTTTTTNNNNNNNNLLLLLLLLVVVVVVVPPPPPPPYYYYYYYYYYYYPPPPPPPRRRRRRRRRRRIIIIIIIIHHHHHHHHHHFFFFFFFFFFFPPPPPPPLLLLLLLLAAAAATTTTTTTYYYYYYYYYYYYAAAAAPPPPPPPVVVVVVVIIIIIIIISSSSSSAAAAAEEEEEEEEEKKKKKKKKKAAAAAYYYYYYYYYYYYHHHHHHHHHHEEEEEEEEEQQQQQQQQQLLLLLLLLTTTTTTTVVVVVVVAAAAADDDDDDDDIIIIIIIITTTTTTTNNNNNNNNAAAAACCCCCCFFFFFFFFFFFEEEEEEEEEPPPPPPPAAAAANNNNNNNNQQQQQQQQQMMMMMMMMVVVVVVVKKKKKKKKKCCCCCCDDDDDDDDPPPPPPPRRRRRRRRRRRHHHHHHHHHHGGGGKKKKKKKKKYYYYYYYYYYYYMMMMMMMMAAAAACCCCCCCCCCCCLLLLLLLLLLLLLLLLYYYYYYYYYYYYRRRRRRRRRRRGGGGDDDDDDDDVVVVVVVVVVVVVVPPPPPPPKKKKKKKKKDDDDDDDDVVVVVVVNNNNNNNNAAAAAAAAAAIIIIIIIIAAAAATTTTTTTIIIIIIIIKKKKKKKKKTTTTTTTKKKKKKKKKRRRRRRRRRRRSSSSSSIIIIIIIIQQQQQQQQQFFFFFFFFFFFVVVVVVVDDDDDDDDWWWWWWWWWWWWWWCCCCCCPPPPPPPTTTTTTTGGGGFFFFFFFFFFFKKKKKKKKKVVVVVVVGGGGIIIIIIIINNNNNNNNYYYYYYYYYYYYQQQQQQQQQPPPPPPPPPPPPPPTTTTTTTVVVVVVVVVVVVVVPPPPPPPGGGGGGGGDDDDDDDDLLLLLLLLAAAAAKKKKKKKKKVVVVVVVQQQQQQQQQRRRRRRRRRRRAAAAAVVVVVVVCCCCCCMMMMMMMMLLLLLLLLSSSSSSNNNNNNNNTTTTTTTTTTTTTTAAAAAIIIIIIIIAAAAAEEEEEEEEEAAAAAWWWWWWWWWWWWWWAAAAARRRRRRRRRRRLLLLLLLLDDDDDDDDHHHHHHHHHHKKKKKKKKKFFFFFFFFFFFDDDDDDDDLLLLLLLLMMMMMMMMYYYYYYYYYYYYAAAAAKKKKKKKKKRRRRRRRRRRRAAAAAFFFFFFFFFFFVVVVVVVHHHHHHHHHHWWWWWWWWWWWWWWYYYYYYYYYYYYVVVVVVVGGGGEEEEEEEEEGGGGMMMMMMMMEEEEEEEEEEEEEEEEEEGGGGEEEEEEEEEFFFFFFFFFFFSSSSSSEEEEEEEEEAAAAARRRRRRRRRRREEEEEEEEEDDDDDDDDMMMMMMMMAAAAAAAAAALLLLLLLLEEEEEEEEEKKKKKKKKKDDDDDDDDYYYYYYYYYYYYEEEEEEEEEEEEEEEEEEVVVVVVVGGGGAAAAADDDDDDDDSSSSSSAAAAADDDDDDDDAAAAAEEEEEEEEEDDDDDDDDEEEEEEEEEGGGGEEEEEEEEEEEEEEEEEEYYYYYYYYYYYYY

SEQ ID NO: 106 - protein, 3469 aa, Anemia phyllitidis
MMMMMMMMRRRRRRRRRRREEEEEEEEEIIIIIIIILLLLLLLLHHHHHHHHHHVVVVVVVQQQQQQQQQGGGGGGGGQQQQQQQQQCCCCCCGGGGNNNNNNNNQQQQQQQQQIIIIIIIIGGGGAAAAAKKKKKKKKKFFFFFFFFFFFWWWWWWWWWWWWWWEEEEEEEEEVVVVVVVVVVVVVVCCCCCCTTTTTTTEEEEEEEEEHHHHHHHHHHGGGGIIIIIIIIDDDDDDDDPPPPPPPTTTTTTTGGGGTTTTTTTYYYYYYYYYYYYRRRRRRRRRRRGGGGDDDDDDDDSSSSSSEEEEEEEEETTTTTTTQQQQQQQQQLLLLLLLLEEEEEEEEERRRRRRRRRRRVVVVVVVNNNNNNNNVVVVVVVYYYYYYYYYYYYYYYYYYYYYYYYNNNNNNNNEEEEEEEEEAAAAASSSSSSCCCCCCGGGGRRRRRRRRRRRYYYYYYYYYYYYVVVVVVVPPPPPPPRRRRRRRRRRRAAAAAVVVVVVVLLLLLLLLMMMMMMMMDDDDDDDDLLLLLLLLEEEEEEEEEPPPPPPPGGGGTTTTTTTMMMMMMMMDDDDDDDDSSSSSSVVVVVVVRRRRRRRRRRRSSSSSSGGGGHHHHHHHHHHYYYYYYYYYYYYGGGGQQQQQQQQQIIIIIIIIFFFFFFFFFFFRRRRRRRRRRRPPPPPPPDDDDDDDDNNNNNNNNFFFFFFFFFFFVVVVVVVFFFFFFFFFFFGGGGQQQQQQQQQSSSSSSGGGGAAAAAGGGGNNNNNNNNNNNNNNNNWWWWWWWWWWWWWWAAAAAKKKKKKKKKGGGGGGGGYYYYYYYYYYYYTTTTTTTEEEEEEEEEGGGGAAAAAEEEEEEEEELLLLLLLLIIIIIIIIDDDDDDDDSSSSSSVVVVVVVLLLLLLLLAAAAAVVVVVVVVVVVVVVRRRRRRRRRRRKKKKKKKKKEEEEEEEEEAAAAAEEEEEEEEENNNNNNNNCCCCCCDDDDDDDDCCCCCCLLLLLLLLQQQQQQQQQGGGGFFFFFFFFFFFQQQQQQQQQVVVVVVVCCCCCCHHHHHHHHHHSSSSSSLLLLLLLLGGGGGGGGGGGGTTTTTTTGGGGSSSSSSGGGGMMMMMMMMGGGGTTTTTTTLLLLLLLLLLLLLLLLIIIIIIIISSSSSSKKKKKKKKKIIIIIIIIRRRRRRRRRRREEEEEEEEEEEEEEEEEEYYYYYYYYYYYYPPPPPPPDDDDDDDDRRRRRRRRRRRMMMMMMMMMMMMMMMMMMMMMMMMTTTTTTTFFFFFFFFFFFSSSSSSVVVVVVVFFFFFFFFFFFAAAAASSSSSSPPPPPPPKKKKKKKKKVVVVVVVSSSSSSDDDDDDDDTTTTTTTVVVVVVVVVVVVVVEEEEEEEEEPPPPPPPYYYYYYYYYYYYNNNNNNNNAAAAATTTTTTTLLLLLLLLSSSSSSVVVVVVVHHHHHHHHHHQQQQQQQQQLLLLLLLLVVVVVVVEEEEEEEEENNNNNNNNAAAAADDDDDDDDEEEEEEEEECCCCCCMMMMMMMMVVVVVVVLLLLLLLLDDDDDDDDNNNNNNNNEEEEEEEEEAAAAALLLLLLLLYYYYYYYYYYYYDDDDDDDDIIIIIIIIGGGGLLLLLLLLRRRRRRRRRRRTTTTTTTLLLLLLLLKKKKKKKKKLLLLLLLLVVVVVVVTTTTTTTPPPPPPPTTTTTTTFFFFFFFFFFFGGGGDDDDDDDDLLLLLLLLNNNNNNNNHHHHHHHHHHLLLLLLLLIIIIIIIISSSSSSAAAAATTTTTTTMMMMMMMMSSSSSSGGGGVVVVVVVTTTTTTTCCCCCCCCCCCCLLLLLLLLRRRRRRRRRRRFFFFFFFFFFFPPPPPPPGGGGQQQQQQQQQLLLLLLLLNNNNNNNNSSSSSSDDDDDDDDLLLLLLLLRRRRRRRRRRRKKKKKKKKKLLLLLLLLAAAAAVVVVVVVNNNNNNNNLLLLLLLLIIIIIIIIPPPPPPPFFFFFFFFFFFPPPPPPPRRRRRRRRRRRLLLLLLLLHHHHHHHHHHFFFFFFFFFFFFFFFFFFFFFFMMMMMMMMVVVVVVVGGGGFFFFFFFFFFFAAAAAPPPPPPPLLLLLLLLTTTTTTTSSSSSSRRRRRRRRRRRGGGGSSSSSSQQQQQQQQQQQQQQQQQQYYYYYYYYYYYYGGGGSSSSSSLLLLLLLLTTTTTTTVVVVVVVPPPPPPPEEEEEEEEELLLLLLLLTTTTTTTQQQQQQQQQQQQQQQQQQMMMMMMMMWWWWWWWWWWWWWWDDDDDDDDAAAAAKKKKKKKKKNNNNNNNNMMMMMMMMMMMMMMMMCCCCCCAAAAAAAAAADDDDDDDDPPPPPPPRRRRRRRRRRRHHHHHHHHHHGGGGRRRRRRRRRRRYYYYYYYYYYYYLLLLLLLLTTTTTTTAAAAASSSSSSAAAAAMMMMMMMMFFFFFFFFFFFRRRRRRRRRRRGGGGKKKKKKKKKMMMMMMMMSSSSSSTTTTTTTKKKKKKKKKEEEEEEEEEVVVVVVVDDDDDDDDEEEEEEEEEQQQQQQQQQMMMMMMMMIIIIIIIINNNNNNNNVVVVVVVQQQQQQQQQNNNNNNNNKKKKKKKKKNNNNNNNNSSSSSSSSSSSSYYYYYYYYYYYYFFFFFFFFFFFVVVVVVVEEEEEEEEEWWWWWWWWWWWWWWIIIIIIIIPPPPPPPNNNNNNNNNNNNNNNNVVVVVVVKKKKKKKKKSSSSSSSSSSSSVVVVVVVCCCCCCDDDDDDDDIIIIIIIIPPPPPPPPPPPPPPVVVVVVVGGGGLLLLLLLLKKKKKKKKKMMMMMMMMAAAAAVVVVVVVTTTTTTTFFFFFFFFFFFIIIIIIIIGGGGNNNNNNNNSSSSSSTTTTTTTSSSSSSIIIIIIIIQQQQQQQQQEEEEEEEEEMMMMMMMMFFFFFFFFFFFRRRRRRRRRRRRRRRRRRRRRRVVVVVVVSSSSSSDDDDDDDDQQQQQQQQQFFFFFFFFFFFTTTTTTTAAAAAMMMMMMMMFFFFFFFFFFFRRRRRRRRRRRRRRRRRRRRRRKKKKKKKKKAAAAAFFFFFFFFFFFLLLLLLLLHHHHHHHHHHWWWWWWWWWWWWWWYYYYYYYYYYYYTTTTTTTGGGGEEEEEEEEEGGGGMMMMMMMMDDDDDDDDEEEEEEEEEMMMMMMMMEEEEEEEEEFFFFFFFFFFFTTTTTTTEEEEEEEEEAAAAAEEEEEEEEESSSSSSNNNNNNNNMMMMMMMMNNNNNNNNDDDDDDDDLLLLLLLLVVVVVVVSSSSSSEEEEEEEEEYYYYYYYYYYYYQQQQQQQQQQQQQQQQQQYYYYYYYYYYYYQQQQQQQQQDDDDDDDDAAAAATTTTTTTAAAAAEEEEEEEEERRRRRRRRRRREEEEEEEEEGGGGEEEEEEEEEYYYYYYYYYYYYEEEEEEEEEEEEEEEEEEDDDDDDDDYYYYYYYYYYYYDDDDDDDDEEEEEEEEEAAAAAA

SEQ ID NO: 107 - protein, 3518 aa, Arabidopsis thaliana
MMMMMMMMRRRRRRRRRRREEEEEEEEEIIIIIIIILLLLLLLLHHHHHHHHHHVVVVVVVQQQQQQQQQGGGGGGGGQQQQQQQQQCCCCCCGGGGNNNNNNNNQQQQQQQQQIIIIIIIIGGGGSSSSSSKKKKKKKKKFFFFFFFFFFFWWWWWWWWWWWWWWEEEEEEEEEVVVVVVVIIIIIIIICCCCCCDDDDDDDDEEEEEEEEEHHHHHHHHHHGGGGVVVVVVVDDDDDDDDPPPPPPPTTTTTTTGGGGRRRRRRRRRRRYYYYYYYYYYYYNNNNNNNNGGGGDDDDDDDDSSSSSSAAAAADDDDDDDDLLLLLLLLQQQQQQQQQLLLLLLLLEEEEEEEEERRRRRRRRRRRIIIIIIIINNNNNNNNVVVVVVVYYYYYYYYYYYYYYYYYYYYYYYYNNNNNNNNEEEEEEEEEAAAAASSSSSSGGGGGGGGRRRRRRRRRRRYYYYYYYYYYYYVVVVVVVPPPPPPPRRRRRRRRRRRAAAAAVVVVVVVLLLLLLLLMMMMMMMMDDDDDDDDLLLLLLLLEEEEEEEEEPPPPPPPGGGGTTTTTTTMMMMMMMMDDDDDDDDSSSSSSIIIIIIIIRRRRRRRRRRRSSSSSSGGGGPPPPPPPYYYYYYYYYYYYGGGGQQQQQQQQQIIIIIIIIFFFFFFFFFFFRRRRRRRRRRRPPPPPPPDDDDDDDDNNNNNNNNFFFFFFFFFFFVVVVVVVFFFFFFFFFFFGGGGQQQQQQQQQSSSSSSGGGGAAAAAGGGGNNNNNNNNNNNNNNNNWWWWWWWWWWWWWWAAAAAKKKKKKKKKGGGGHHHHHHHHHHYYYYYYYYYYYYTTTTTTTEEEEEEEEEGGGGAAAAAEEEEEEEEELLLLLLLLIIIIIIIIDDDDDDDDAAAAAVVVVVVVLLLLLLLLDDDDDDDDVVVVVVVVVVVVVVRRRRRRRRRRRKKKKKKKKKEEEEEEEEEAAAAAEEEEEEEEENNNNNNNNCCCCCCDDDDDDDDCCCCCCLLLLLLLLQQQQQQQQQGGGGFFFFFFFFFFFQQQQQQQQQVVVVVVVCCCCCCHHHHHHHHHHSSSSSSLLLLLLLLGGGGGGGGGGGGTTTTTTTGGGGSSSSSSGGGGMMMMMMMMGGGGTTTTTTTLLLLLLLLLLLLLLLLIIIIIIIISSSSSSKKKKKKKKKIIIIIIIIRRRRRRRRRRREEEEEEEEEEEEEEEEEEYYYYYYYYYYYYPPPPPPPDDDDDDDDRRRRRRRRRRRMMMMMMMMMMMMMMMMLLLLLLLLTTTTTTTFFFFFFFFFFFSSSSSSVVVVVVVFFFFFFFFFFFPPPPPPPSSSSSSPPPPPPPKKKKKKKKKVVVVVVVSSSSSSDDDDDDDDTTTTTTTVVVVVVVVVVVVVVEEEEEEEEEPPPPPPPYYYYYYYYYYYYNNNNNNNNAAAAATTTTTTTLLLLLLLLSSSSSSVVVVVVVHHHHHHHHHHQQQQQQQQQLLLLLLLLVVVVVVVEEEEEEEEENNNNNNNNAAAAADDDDDDDDEEEEEEEEECCCCCCMMMMMMMMVVVVVVVLLLLLLLLDDDDDDDDNNNNNNNNEEEEEEEEEAAAAALLLLLLLLYYYYYYYYYYYYDDDDDDDDIIIIIIIICCCCCCFFFFFFFFFFFRRRRRRRRRRRTTTTTTTLLLLLLLLKKKKKKKKKLLLLLLLLSSSSSSTTTTTTTPPPPPPPSSSSSSFFFFFFFFFFFGGGGDDDDDDDDLLLLLLLLNNNNNNNNHHHHHHHHHHLLLLLLLLIIIIIIIISSSSSSAAAAATTTTTTTMMMMMMMMSSSSSSGGGGVVVVVVVTTTTTTTCCCCCCSSSSSSLLLLLLLLRRRRRRRRRRRFFFFFFFFFFFPPPPPPPGGGGQQQQQQQQQLLLLLLLLNNNNNNNNSSSSSSDDDDDDDDLLLLLLLLRRRRRRRRRRRKKKKKKKKKLLLLLLLLAAAAAVVVVVVVNNNNNNNNLLLLLLLLIIIIIIIIPPPPPPPFFFFFFFFFFFPPPPPPPRRRRRRRRRRRLLLLLLLLHHHHHHHHHHFFFFFFFFFFFFFFFFFFFFFFMMMMMMMMVVVVVVVGGGGFFFFFFFFFFFAAAAAPPPPPPPLLLLLLLLTTTTTTTSSSSSSRRRRRRRRRRRGGGGSSSSSSQQQQQQQQQQQQQQQQQQYYYYYYYYYYYYIIIIIIIISSSSSSLLLLLLLLTTTTTTTVVVVVVVPPPPPPPEEEEEEEEELLLLLLLLTTTTTTTQQQQQQQQQQQQQQQQQQMMMMMMMMWWWWWWWWWWWWWWDDDDDDDDAAAAAKKKKKKKKKNNNNNNNNMMMMMMMMMMMMMMMMCCCCCCAAAAAAAAAADDDDDDDDPPPPPPPRRRRRRRRRRRHHHHHHHHHHGGGGRRRRRRRRRRRYYYYYYYYYYYYLLLLLLLLTTTTTTTAAAAASSSSSSAAAAAMMMMMMMMFFFFFFFFFFFRRRRRRRRRRRGGGGKKKKKKKKKMMMMMMMMSSSSSSTTTTTTTKKKKKKKKKEEEEEEEEEVVVVVVVDDDDDDDDEEEEEEEEEQQQQQQQQQIIIIIIIILLLLLLLLNNNNNNNNVVVVVVVQQQQQQQQQNNNNNNNNKKKKKKKKKNNNNNNNNSSSSSSSSSSSSYYYYYYYYYYYYFFFFFFFFFFFVVVVVVVEEEEEEEEEWWWWWWWWWWWWWWIIIIIIIIPPPPPPPNNNNNNNNNNNNNNNNVVVVVVVKKKKKKKKKSSSSSSSSSSSSVVVVVVVCCCCCCDDDDDDDDIIIIIIIIPPPPPPPPPPPPPPTTTTTTTGGGGIIIIIIIIKKKKKKKKKMMMMMMMMAAAAASSSSSSTTTTTTTFFFFFFFFFFFVVVVVVVGGGGNNNNNNNNSSSSSSTTTTTTTSSSSSSIIIIIIIIQQQQQQQQQEEEEEEEEEMMMMMMMMFFFFFFFFFFFRRRRRRRRRRRRRRRRRRRRRRVVVVVVVSSSSSSEEEEEEEEEQQQQQQQQQFFFFFFFFFFFTTTTTTTAAAAAMMMMMMMMFFFFFFFFFFFRRRRRRRRRRRRRRRRRRRRRRKKKKKKKKKAAAAAFFFFFFFFFFFLLLLLLLLHHHHHHHHHHWWWWWWWWWWWWWWYYYYYYYYYYYYTTTTTTTGGGGEEEEEEEEEGGGGMMMMMMMMDDDDDDDDEEEEEEEEEMMMMMMMMEEEEEEEEEFFFFFFFFFFFTTTTTTTEEEEEEEEEAAAAAEEEEEEEEESSSSSSNNNNNNNNMMMMMMMMNNNNNNNNDDDDDDDDLLLLLLLLVVVVVVVSSSSSSEEEEEEEEEYYYYYYYYYYYYQQQQQQQQQQQQQQQQQQYYYYYYYYYYYYQQQQQQQQQDDDDDDDDAAAAATTTTTTTAAAAADDDDDDDDEEEEEEEEEEEEEEEEEEDDDDDDDDEEEEEEEEEYYYYYYYYYYYYDDDDDDDDEEEEEEEEEEEEEEEEEEEEEEEEEEEEEEEEEEEEQQQQQQQQQVVVVVVVYYYYYYYYYYYYEEEEEEEEESSSSSSS

SEQ ID NO: 108 - protein, 3031 aa, Avena sativa
AAAAAVVVVVVVLLLLLLLLMMMMMMMMDDDDDDDDLLLLLLLLEEEEEEEEEPPPPPPPGGGGTTTTTTTMMMMMMMMDDDDDDDDSSSSSSVVVVVVVRRRRRRRRRRRTTTTTTTGGGGPPPPPPPYYYYYYYYYYYYGGGGQQQQQQQQQIIIIIIIIFFFFFFFFFFFRRRRRRRRRRRPPPPPPPDDDDDDDDNNNNNNNNFFFFFFFFFFFVVVVVVVFFFFFFFFFFFGGGGQQQQQQQQQSSSSSSGGGGAAAAAGGGGNNNNNNNNNNNNNNNNWWWWWWWWWWWWWWAAAAAKKKKKKKKKGGGGHHHHHHHHHHYYYYYYYYYYYYTTTTTTTEEEEEEEEEGGGGAAAAAEEEEEEEEELLLLLLLLIIIIIIIIDDDDDDDDSSSSSSVVVVVVVLLLLLLLLDDDDDDDDVVVVVVVVVVVVVVRRRRRRRRRRRKKKKKKKKKEEEEEEEEEAAAAAEEEEEEEEENNNNNNNNCCCCCCDDDDDDDDCCCCCCLLLLLLLLQQQQQQQQQGGGGFFFFFFFFFFFQQQQQQQQQVVVVVVVCCCCCCHHHHHHHHHHSSSSSSLLLLLLLLGGGGGGGGGGGGTTTTTTTGGGGSSSSSSGGGGMMMMMMMMGGGGTTTTTTTLLLLLLLLLLLLLLLLIIIIIIIISSSSSSKKKKKKKKKIIIIIIIIRRRRRRRRRRREEEEEEEEEEEEEEEEEEYYYYYYYYYYYYPPPPPPPDDDDDDDDRRRRRRRRRRRMMMMMMMMMMMMMMMMLLLLLLLLTTTTTTTFFFFFFFFFFFSSSSSSVVVVVVVFFFFFFFFFFFPPPPPPPSSSSSSPPPPPPPKKKKKKKKKVVVVVVVSSSSSSDDDDDDDDTTTTTTTVVVVVVVVVVVVVVEEEEEEEEEPPPPPPPYYYYYYYYYYYYNNNNNNNNAAAAATTTTTTTLLLLLLLLSSSSSSVVVVVVVHHHHHHHHHHQQQQQQQQQLLLLLLLLVVVVVVVEEEEEEEEENNNNNNNNAAAAADDDDDDDDEEEEEEEEECCCCCCMMMMMMMMVVVVVVVLLLLLLLLDDDDDDDDNNNNNNNNEEEEEEEEEAAAAALLLLLLLLYYYYYYYYYYYYDDDDDDDDIIIIIIIICCCCCCFFFFFFFFFFFRRRRRRRRRRRTTTTTTTLLLLLLLLKKKKKKKKKLLLLLLLLTTTTTTTTTTTTTTPPPPPPPSSSSSSFFFFFFFFFFFGGGGDDDDDDDDLLLLLLLLNNNNNNNNHHHHHHHHHHLLLLLLLLIIIIIIIISSSSSSAAAAATTTTTTTMMMMMMMMSSSSSSGGGGVVVVVVVTTTTTTTCCCCCCCCCCCCLLLLLLLLRRRRRRRRRRRFFFFFFFFFFFPPPPPPPGGGGQQQQQQQQQLLLLLLLLNNNNNNNNSSSSSSDDDDDDDDLLLLLLLLRRRRRRRRRRRKKKKKKKKKLLLLLLLLAAAAAVVVVVVVNNNNNNNNLLLLLLLLIIIIIIIIPPPPPPPFFFFFFFFFFFPPPPPPPRRRRRRRRRRRLLLLLLLLHHHHHHHHHHFFFFFFFFFFFFFFFFFFFFFFMMMMMMMMVVVVVVVGGGGFFFFFFFFFFFAAAAAPPPPPPPLLLLLLLLTTTTTTTSSSSSSRRRRRRRRRRRGGGGSSSSSSQQQQQQQQQQQQQQQQQQYYYYYYYYYYYYRRRRRRRRRRRAAAAALLLLLLLLTTTTTTTVVVVVVVPPPPPPPEEEEEEEEELLLLLLLLTTTTTTTQQQQQQQQQQQQQQQQQQMMMMMMMMWWWWWWWWWWWWWWDDDDDDDDSSSSSSKKKKKKKKKNNNNNNNNMMMMMMMMMMMMMMMMCCCCCCAAAAAAAAAADDDDDDDDPPPPPPPRRRRRRRRRRRHHHHHHHHHHGGGGRRRRRRRRRRRYYYYYYYYYYYYLLLLLLLLTTTTTTTAAAAASSSSSSAAAAAMMMMMMMMFFFFFFFFFFFRRRRRRRRRRRGGGGKKKKKKKKKMMMMMMMMSSSSSSTTTTTTTKKKKKKKKKEEEEEEEEEVVVVVVVDDDDDDDDEEEEEEEEEQQQQQQQQQMMMMMMMMIIIIIIIINNNNNNNNVVVVVVVQQQQQQQQQNNNNNNNNKKKKKKKKKNNNNNNNNSSSSSSSSSSSSYYYYYYYYYYYYFFFFFFFFFFFVVVVVVVEEEEEEEEEWWWWWWWWWWWWWWIIIIIIIIPPPPPPPNNNNNNNNNNNNNNNNVVVVVVVKKKKKKKKKSSSSSSSSSSSSVVVVVVVCCCCCCDDDDDDDDIIIIIIIIPPPPPPPPPPPPPPTTTTTTTGGGGLLLLLLLLSSSSSSMMMMMMMMAAAAASSSSSSTTTTTTTFFFFFFFFFFFIIIIIIIIGGGGNNNNNNNNSSSSSSTTTTTTTSSSSSSIIIIIIIIQQQQQQQQQEEEEEEEEEMMMMMMMMFFFFFFFFFFFRRRRRRRRRRRRRRRRRRRRRRVVVVVVVSSSSSSEEEEEEEEEQQQQQQQQQFFFFFFFFFFFTTTTTTTAAAAAMMMMMMMMFFFFFFFFFFFRRRRRRRRRRRRRRRRRRRRRRKKKKKKKKKAAAAAFFFFFFFFFFFLLLLLLLLHHHHHHHHHHWWWWWWWWWWWWWWYYYYYYYYYYYYTTTTTTTGGGGEEEEEEEEEGGGGMMMMMMMMDDDDDDDDEEEEEEEEEMMMMMMMMEEEEEEEEEFFFFFFFFFFFTTTTTTTEEEEEEEEEAAAAAEEEEEEEEESSSSSSNNNNNNNNMMMMMMMMNNNNNNNNDDDDDDDDLLLLLLLLVVVVVVVSSSSSSEEEEEEEEEYYYYYYYYYYYYQQQQQQQQQQQQQQQQQQYYYYYYYYYYYYQQQQQQQQQDDDDDDDDAAAAATTTTTTTAAAAADDDDDDDDEEEEEEEEEEEEEEEEEEGGGGEEEEEEEEEYYYYYYYYYYYYEEEEEEEEEDDDDDDDDEEEEEEEEEEEEEEEEEEEEEEEEEEEDDDDDDDDLLLLLLLLQQQQQQQQQAAAAAEEEEEEEEEDDDDDDDDMMMMMMMMM

SEQ ID NO: 109 - protein, 3519 aa, Brugia pahangi
MMMMMMMMRRRRRRRRRRREEEEEEEEEIIIIIIIIVVVVVVVHHHHHHHHHHVVVVVVVQQQQQQQQQAAAAAGGGGQQQQQQQQQCCCCCCGGGGNNNNNNNNQQQQQQQQQIIIIIIIIGGGGAAAAAKKKKKKKKKFFFFFFFFFFFWWWWWWWWWWWWWWEEEEEEEEEVVVVVVVIIIIIIIISSSSSSDDDDDDDDEEEEEEEEEHHHHHHHHHHGGGGVVVVVVVQQQQQQQQQPPPPPPPDDDDDDDDGGGGTTTTTTTYYYYYYYYYYYYKKKKKKKKKGGGGDDDDDDDDSSSSSSDDDDDDDDLLLLLLLLQQQQQQQQQIIIIIIIIEEEEEEEEERRRRRRRRRRRIIIIIIIINNNNNNNNVVVVVVVYYYYYYYYYYYYYYYYYYYYYYYYNNNNNNNNEEEEEEEEEAAAAANNNNNNNNGGGGGGGGKKKKKKKKKYYYYYYYYYYYYVVVVVVVPPPPPPPRRRRRRRRRRRAAAAAVVVVVVVLLLLLLLLVVVVVVVDDDDDDDDLLLLLLLLEEEEEEEEEPPPPPPPGGGGTTTTTTTMMMMMMMMDDDDDDDDSSSSSSIIIIIIIIRRRRRRRRRRRGGGGGGGGEEEEEEEEEFFFFFFFFFFFGGGGQQQQQQQQQLLLLLLLLFFFFFFFFFFFRRRRRRRRRRRPPPPPPPDDDDDDDDNNNNNNNNFFFFFFFFFFFVVVVVVVFFFFFFFFFFFGGGGQQQQQQQQQSSSSSSGGGGAAAAAGGGGNNNNNNNNNNNNNNNNWWWWWWWWWWWWWWAAAAAKKKKKKKKKGGGGHHHHHHHHHHYYYYYYYYYYYYTTTTTTTEEEEEEEEEGGGGAAAAAEEEEEEEEELLLLLLLLVVVVVVVDDDDDDDDNNNNNNNNVVVVVVVLLLLLLLLDDDDDDDDVVVVVVVIIIIIIIIRRRRRRRRRRRKKKKKKKKKEEEEEEEEEAAAAAEEEEEEEEEGGGGCCCCCCDDDDDDDDCCCCCCLLLLLLLLQQQQQQQQQGGGGFFFFFFFFFFFQQQQQQQQQLLLLLLLLTTTTTTTHHHHHHHHHHSSSSSSLLLLLLLLGGGGGGGGGGGGTTTTTTTGGGGSSSSSSGGGGMMMMMMMMGGGGTTTTTTTLLLLLLLLLLLLLLLLIIIIIIIISSSSSSKKKKKKKKKIIIIIIIIRRRRRRRRRRREEEEEEEEEEEEEEEEEEYYYYYYYYYYYYPPPPPPPDDDDDDDDRRRRRRRRRRRIIIIIIIIMMMMMMMMSSSSSSSSSSSSFFFFFFFFFFFSSSSSSVVVVVVVVVVVVVVPPPPPPPSSSSSSPPPPPPPKKKKKKKKKVVVVVVVSSSSSSDDDDDDDDVVVVVVVVVVVVVVLLLLLLLLEEEEEEEEEPPPPPPPYYYYYYYYYYYYNNNNNNNNAAAAATTTTTTTLLLLLLLLSSSSSSVVVVVVVHHHHHHHHHHQQQQQQQQQLLLLLLLLVVVVVVVEEEEEEEEENNNNNNNNTTTTTTTDDDDDDDDEEEEEEEEETTTTTTTFFFFFFFFFFFCCCCCCIIIIIIIIDDDDDDDDNNNNNNNNEEEEEEEEEAAAAALLLLLLLLYYYYYYYYYYYYDDDDDDDDIIIIIIIICCCCCCFFFFFFFFFFFRRRRRRRRRRRTTTTTTTLLLLLLLLKKKKKKKKKLLLLLLLLAAAAANNNNNNNNPPPPPPPTTTTTTTYYYYYYYYYYYYGGGGDDDDDDDDLLLLLLLLNNNNNNNNHHHHHHHHHHLLLLLLLLVVVVVVVSSSSSSVVVVVVVTTTTTTTMMMMMMMMSSSSSSGGGGVVVVVVVTTTTTTTTTTTTTTCCCCCCLLLLLLLLRRRRRRRRRRRFFFFFFFFFFFPPPPPPPGGGGQQQQQQQQQLLLLLLLLNNNNNNNNAAAAADDDDDDDDLLLLLLLLRRRRRRRRRRRKKKKKKKKKLLLLLLLLAAAAAVVVVVVVNNNNNNNNMMMMMMMMVVVVVVVPPPPPPPFFFFFFFFFFFPPPPPPPRRRRRRRRRRRLLLLLLLLHHHHHHHHHHFFFFFFFFFFFFFFFFFFFFFFMMMMMMMMPPPPPPPGGGGFFFFFFFFFFFAAAAAPPPPPPPLLLLLLLLSSSSSSAAAAARRRRRRRRRRRDDDDDDDDAAAAAAAAAAAAAAAYYYYYYYYYYYYRRRRRRRRRRRAAAAALLLLLLLLNNNNNNNNVVVVVVVAAAAAEEEEEEEEELLLLLLLLTTTTTTTQQQQQQQQQQQQQQQQQQMMMMMMMMFFFFFFFFFFFDDDDDDDDAAAAAKKKKKKKKKNNNNNNNNMMMMMMMMMMMMMMMMAAAAAAAAAACCCCCCDDDDDDDDPPPPPPPRRRRRRRRRRRHHHHHHHHHHGGGGRRRRRRRRRRRYYYYYYYYYYYYLLLLLLLLTTTTTTTVVVVVVVAAAAAAAAAAMMMMMMMMFFFFFFFFFFFRRRRRRRRRRRGGGGRRRRRRRRRRRMMMMMMMMSSSSSSMMMMMMMMRRRRRRRRRRREEEEEEEEEVVVVVVVDDDDDDDDEEEEEEEEEQQQQQQQQQMMMMMMMMMMMMMMMMQQQQQQQQQVVVVVVVQQQQQQQQQNNNNNNNNKKKKKKKKKNNNNNNNNSSSSSSSSSSSSYYYYYYYYYYYYFFFFFFFFFFFVVVVVVVEEEEEEEEEWWWWWWWWWWWWWWIIIIIIIIPPPPPPPNNNNNNNNNNNNNNNNVVVVVVVKKKKKKKKKTTTTTTTAAAAAVVVVVVVCCCCCCDDDDDDDDIIIIIIIIPPPPPPPPPPPPPPRRRRRRRRRRRGGGGLLLLLLLLKKKKKKKKKMMMMMMMMSSSSSSAAAAATTTTTTTFFFFFFFFFFFIIIIIIIIGGGGNNNNNNNNTTTTTTTTTTTTTTAAAAAIIIIIIIIQQQQQQQQQEEEEEEEEELLLLLLLLFFFFFFFFFFFKKKKKKKKKRRRRRRRRRRRIIIIIIIISSSSSSEEEEEEEEEQQQQQQQQQFFFFFFFFFFFTTTTTTTAAAAAMMMMMMMMFFFFFFFFFFFRRRRRRRRRRRRRRRRRRRRRRKKKKKKKKKAAAAAFFFFFFFFFFFLLLLLLLLHHHHHHHHHHWWWWWWWWWWWWWWYYYYYYYYYYYYTTTTTTTGGGGEEEEEEEEEGGGGMMMMMMMMDDDDDDDDEEEEEEEEEMMMMMMMMEEEEEEEEEFFFFFFFFFFFTTTTTTTEEEEEEEEEAAAAAEEEEEEEEESSSSSSNNNNNNNNMMMMMMMMNNNNNNNNDDDDDDDDLLLLLLLLVVVVVVVSSSSSSEEEEEEEEEYYYYYYYYYYYYQQQQQQQQQQQQQQQQQQYYYYYYYYYYYYQQQQQQQQQDDDDDDDDAAAAATTTTTTTAAAAADDDDDDDDEEEEEEEEEEEEEEEEEEGGGGDDDDDDDDLLLLLLLLQQQQQQQQQEEEEEEEEEGGGGEEEEEEEEESSSSSSEEEEEEEEEYYYYYYYYYYYYIIIIIIIIEEEEEEEEEQQQQQQQQQEEEEEEEEEEEEEEEEEEE

SEQ ID NO: 110 - protein, 3500 aa, Gallus gallus
MMMMMMMMRRRRRRRRRRREEEEEEEEEIIIIIIIIVVVVVVVHHHHHHHHHHIIIIIIIIQQQQQQQQQAAAAAGGGGQQQQQQQQQCCCCCCGGGGNNNNNNNNQQQQQQQQQIIIIIIIIGGGGAAAAAKKKKKKKKKFFFFFFFFFFFWWWWWWWWWWWWWWEEEEEEEEEVVVVVVVIIIIIIIISSSSSSDDDDDDDDEEEEEEEEEHHHHHHHHHHGGGGIIIIIIIIDDDDDDDDPPPPPPPTTTTTTTGGGGSSSSSSYYYYYYYYYYYYHHHHHHHHHHGGGGDDDDDDDDSSSSSSDDDDDDDDLLLLLLLLQQQQQQQQQLLLLLLLLEEEEEEEEERRRRRRRRRRRIIIIIIIINNNNNNNNVVVVVVVYYYYYYYYYYYYYYYYYYYYYYYYNNNNNNNNEEEEEEEEEAAAAAAAAAAGGGGNNNNNNNNKKKKKKKKKYYYYYYYYYYYYVVVVVVVPPPPPPPRRRRRRRRRRRAAAAAIIIIIIIILLLLLLLLVVVVVVVDDDDDDDDLLLLLLLLEEEEEEEEEPPPPPPPGGGGTTTTTTTMMMMMMMMDDDDDDDDSSSSSSVVVVVVVRRRRRRRRRRRSSSSSSGGGGPPPPPPPFFFFFFFFFFFGGGGQQQQQQQQQIIIIIIIIFFFFFFFFFFFRRRRRRRRRRRPPPPPPPDDDDDDDDNNNNNNNNFFFFFFFFFFFVVVVVVVFFFFFFFFFFFGGGGQQQQQQQQQSSSSSSGGGGAAAAAGGGGNNNNNNNNNNNNNNNNWWWWWWWWWWWWWWAAAAAKKKKKKKKKGGGGHHHHHHHHHHYYYYYYYYYYYYTTTTTTTEEEEEEEEEGGGGAAAAAEEEEEEEEELLLLLLLLVVVVVVVDDDDDDDDSSSSSSVVVVVVVLLLLLLLLDDDDDDDDVVVVVVVVVVVVVVRRRRRRRRRRRKKKKKKKKKEEEEEEEEESSSSSSEEEEEEEEESSSSSSCCCCCCDDDDDDDDCCCCCCLLLLLLLLQQQQQQQQQGGGGFFFFFFFFFFFQQQQQQQQQLLLLLLLLTTTTTTTHHHHHHHHHHSSSSSSLLLLLLLLGGGGGGGGGGGGTTTTTTTGGGGSSSSSSGGGGMMMMMMMMGGGGTTTTTTTLLLLLLLLLLLLLLLLIIIIIIIISSSSSSKKKKKKKKKIIIIIIIIRRRRRRRRRRREEEEEEEEEEEEEEEEEEYYYYYYYYYYYYPPPPPPPDDDDDDDDRRRRRRRRRRRIIIIIIIIMMMMMMMMNNNNNNNNTTTTTTTFFFFFFFFFFFSSSSSSVVVVVVVMMMMMMMMPPPPPPPSSSSSSPPPPPPPKKKKKKKKKVVVVVVVSSSSSSDDDDDDDDTTTTTTTVVVVVVVVVVVVVVEEEEEEEEEPPPPPPPYYYYYYYYYYYYNNNNNNNNAAAAATTTTTTTVVVVVVVSSSSSSVVVVVVVHHHHHHHHHHQQQQQQQQQLLLLLLLLVVVVVVVEEEEEEEEENNNNNNNNTTTTTTTDDDDDDDDEEEEEEEEETTTTTTTYYYYYYYYYYYYCCCCCCIIIIIIIIDDDDDDDDNNNNNNNNEEEEEEEEEAAAAALLLLLLLLYYYYYYYYYYYYDDDDDDDDIIIIIIIICCCCCCFFFFFFFFFFFRRRRRRRRRRRTTTTTTTLLLLLLLLKKKKKKKKKLLLLLLLLTTTTTTTTTTTTTTPPPPPPPTTTTTTTYYYYYYYYYYYYGGGGDDDDDDDDLLLLLLLLNNNNNNNNHHHHHHHHHHLLLLLLLLVVVVVVVSSSSSSAAAAATTTTTTTMMMMMMMMSSSSSSGGGGVVVVVVVTTTTTTTTTTTTTTCCCCCCLLLLLLLLRRRRRRRRRRRFFFFFFFFFFFPPPPPPPGGGGQQQQQQQQQLLLLLLLLNNNNNNNNAAAAADDDDDDDDLLLLLLLLRRRRRRRRRRRKKKKKKKKKLLLLLLLLAAAAAVVVVVVVNNNNNNNNMMMMMMMMVVVVVVVPPPPPPPFFFFFFFFFFFPPPPPPPRRRRRRRRRRRLLLLLLLLHHHHHHHHHHFFFFFFFFFFFFFFFFFFFFFFMMMMMMMMPPPPPPPGGGGFFFFFFFFFFFAAAAAPPPPPPPLLLLLLLLTTTTTTTSSSSSSRRRRRRRRRRRGGGGSSSSSSQQQQQQQQQQQQQQQQQQYYYYYYYYYYYYRRRRRRRRRRRAAAAALLLLLLLLTTTTTTTVVVVVVVPPPPPPPEEEEEEEEELLLLLLLLTTTTTTTQQQQQQQQQQQQQQQQQQMMMMMMMMFFFFFFFFFFFDDDDDDDDSSSSSSKKKKKKKKKNNNNNNNNMMMMMMMMMMMMMMMMAAAAAAAAAACCCCCCDDDDDDDDPPPPPPPRRRRRRRRRRRHHHHHHHHHHGGGGRRRRRRRRRRRYYYYYYYYYYYYLLLLLLLLTTTTTTTVVVVVVVAAAAAAAAAAIIIIIIIIFFFFFFFFFFFRRRRRRRRRRRGGGGRRRRRRRRRRRMMMMMMMMSSSSSSMMMMMMMMKKKKKKKKKEEEEEEEEEVVVVVVVDDDDDDDDEEEEEEEEEQQQQQQQQQMMMMMMMMLLLLLLLLNNNNNNNNVVVVVVVQQQQQQQQQNNNNNNNNKKKKKKKKKNNNNNNNNSSSSSSSSSSSSYYYYYYYYYYYYFFFFFFFFFFFVVVVVVVEEEEEEEEEWWWWWWWWWWWWWWIIIIIIIIPPPPPPPNNNNNNNNNNNNNNNNVVVVVVVKKKKKKKKKTTTTTTTAAAAAVVVVVVVCCCCCCDDDDDDDDIIIIIIIIPPPPPPPPPPPPPPRRRRRRRRRRRGGGGLLLLLLLLKKKKKKKKKMMMMMMMMSSSSSSAAAAATTTTTTTFFFFFFFFFFFIIIIIIIIGGGGNNNNNNNNSSSSSSTTTTTTTAAAAAIIIIIIIIQQQQQQQQQEEEEEEEEELLLLLLLLFFFFFFFFFFFKKKKKKKKKRRRRRRRRRRRIIIIIIIISSSSSSEEEEEEEEEQQQQQQQQQFFFFFFFFFFFTTTTTTTAAAAAMMMMMMMMFFFFFFFFFFFRRRRRRRRRRRRRRRRRRRRRRKKKKKKKKKAAAAAFFFFFFFFFFFLLLLLLLLHHHHHHHHHHWWWWWWWWWWWWWWYYYYYYYYYYYYTTTTTTTGGGGEEEEEEEEEGGGGMMMMMMMMDDDDDDDDEEEEEEEEEMMMMMMMMEEEEEEEEEFFFFFFFFFFFTTTTTTTEEEEEEEEEAAAAAEEEEEEEEESSSSSSNNNNNNNNMMMMMMMMNNNNNNNNDDDDDDDDLLLLLLLLVVVVVVVSSSSSSEEEEEEEEEYYYYYYYYYYYYQQQQQQQQQQQQQQQQQQYYYYYYYYYYYYQQQQQQQQQDDDDDDDDAAAAATTTTTTTAAAAADDDDDDDDEEEEEEEEEQQQQQQQQQGGGGEEEEEEEEEFFFFFFFFFFFEEEEEEEEEEEEEEEEEEEEEEEEEEEGGGGEEEEEEEEEEEEEEEEEEDDDDDDDDEEEEEEEEEAAAAAA

SEQ ID NO: 111 - protein, 3537 aa, Chondrus crispus
MMMMMMMMTTTTTTTRRRRRRRRRRRSSSSSSIIIIIIIIVVVVVVVSSSSSSLLLLLLLLQQQQQQQQQVVVVVVVGGGGQQQQQQQQQCCCCCCGGGGNNNNNNNNQQQQQQQQQVVVVVVVGGGGLLLLLLLLKKKKKKKKKFFFFFFFFFFFWWWWWWWWWWWWWWEEEEEEEEEGGGGIIIIIIIISSSSSSAAAAAEEEEEEEEEHHHHHHHHHHGGGGIIIIIIIIDDDDDDDDVVVVVVVDDDDDDDDGGGGKKKKKKKKKYYYYYYYYYYYYIIIIIIIIGGGGDDDDDDDDRRRRRRRRRRRPPPPPPPDDDDDDDDQQQQQQQQQEEEEEEEEELLLLLLLLHHHHHHHHHHRRRRRRRRRRRIIIIIIIIGGGGVVVVVVVYYYYYYYYYYYYYYYYYYYYYYYYNNNNNNNNEEEEEEEEESSSSSSSSSSSSSSSSSSGGGGSSSSSSYYYYYYYYYYYYVVVVVVVPPPPPPPRRRRRRRRRRRAAAAAAAAAAMMMMMMMMLLLLLLLLDDDDDDDDLLLLLLLLEEEEEEEEEPPPPPPPGGGGVVVVVVVLLLLLLLLMMMMMMMMAAAAAIIIIIIIIKKKKKKKKKNNNNNNNNSSSSSSKKKKKKKKKRRRRRRRRRRRGGGGQQQQQQQQQLLLLLLLLFFFFFFFFFFFHHHHHHHHHHPPPPPPPDDDDDDDDNNNNNNNNFFFFFFFFFFFAAAAAYYYYYYYYYYYYGGGGQQQQQQQQQSSSSSSGGGGAAAAAGGGGNNNNNNNNNNNNNNNNWWWWWWWWWWWWWWAAAAAKKKKKKKKKGGGGHHHHHHHHHHYYYYYYYYYYYYTTTTTTTEEEEEEEEEGGGGAAAAAEEEEEEEEELLLLLLLLVVVVVVVEEEEEEEEETTTTTTTAAAAALLLLLLLLDDDDDDDDIIIIIIIIIIIIIIIIRRRRRRRRRRRRRRRRRRRRRREEEEEEEEEAAAAAEEEEEEEEETTTTTTTCCCCCCDDDDDDDDVVVVVVVLLLLLLLLQQQQQQQQQGGGGFFFFFFFFFFFQQQQQQQQQVVVVVVVTTTTTTTHHHHHHHHHHSSSSSSLLLLLLLLGGGGGGGGGGGGTTTTTTTGGGGSSSSSSGGGGMMMMMMMMGGGGTTTTTTTLLLLLLLLLLLLLLLLVVVVVVVSSSSSSKKKKKKKKKIIIIIIIIRRRRRRRRRRREEEEEEEEEEEEEEEEEEYYYYYYYYYYYYPPPPPPPDDDDDDDDRRRRRRRRRRRMMMMMMMMMMMMMMMMCCCCCCTTTTTTTYYYYYYYYYYYYSSSSSSVVVVVVVLLLLLLLLPPPPPPPSSSSSSPPPPPPPKKKKKKKKKVVVVVVVSSSSSSDDDDDDDDTTTTTTTVVVVVVVVVVVVVVEEEEEEEEEPPPPPPPYYYYYYYYYYYYNNNNNNNNCCCCCCTTTTTTTLLLLLLLLSSSSSSIIIIIIIIHHHHHHHHHHQQQQQQQQQLLLLLLLLIIIIIIIIEEEEEEEEENNNNNNNNAAAAADDDDDDDDCCCCCCVVVVVVVFFFFFFFFFFFAAAAAIIIIIIIIDDDDDDDDNNNNNNNNEEEEEEEEEAAAAALLLLLLLLYYYYYYYYYYYYNNNNNNNNIIIIIIIICCCCCCYYYYYYYYYYYYNNNNNNNNTTTTTTTLLLLLLLLKKKKKKKKKIIIIIIIIEEEEEEEEEQQQQQQQQQPPPPPPPSSSSSSYYYYYYYYYYYYDDDDDDDDEEEEEEEEELLLLLLLLNNNNNNNNSSSSSSLLLLLLLLIIIIIIIISSSSSSSSSSSSVVVVVVVMMMMMMMMSSSSSSGGGGIIIIIIIITTTTTTTCCCCCCSSSSSSLLLLLLLLRRRRRRRRRRRFFFFFFFFFFFPPPPPPPGGGGQQQQQQQQQLLLLLLLLNNNNNNNNAAAAADDDDDDDDLLLLLLLLRRRRRRRRRRRKKKKKKKKKLLLLLLLLAAAAAVVVVVVVNNNNNNNNLLLLLLLLVVVVVVVPPPPPPPFFFFFFFFFFFPPPPPPPRRRRRRRRRRRLLLLLLLLHHHHHHHHHHFFFFFFFFFFFFFFFFFFFFFFAAAAAVVVVVVVGGGGHHHHHHHHHHAAAAAPPPPPPPLLLLLLLLAAAAAAAAAASSSSSSNNNNNNNNSSSSSSAAAAAGGGGYYYYYYYYYYYYRRRRRRRRRRRSSSSSSLLLLLLLLSSSSSSVVVVVVVPPPPPPPEEEEEEEEELLLLLLLLAAAAAGGGGQQQQQQQQQMMMMMMMMFFFFFFFFFFFDDDDDDDDRRRRRRRRRRRNNNNNNNNNNNNNNNNMMMMMMMMMMMMMMMMAAAAAEEEEEEEEEIIIIIIIIDDDDDDDDPPPPPPPRRRRRRRRRRREEEEEEEEEGGGGRRRRRRRRRRRYYYYYYYYYYYYLLLLLLLLTTTTTTTAAAAAAAAAAVVVVVVVYYYYYYYYYYYYFFFFFFFFFFFRRRRRRRRRRRGGGGKKKKKKKKKVVVVVVVSSSSSSTTTTTTTKKKKKKKKKEEEEEEEEEVVVVVVVEEEEEEEEEDDDDDDDDEEEEEEEEEMMMMMMMMTTTTTTTLLLLLLLLMMMMMMMMQQQQQQQQQTTTTTTTKKKKKKKKKNNNNNNNNSSSSSSAAAAAYYYYYYYYYYYYFFFFFFFFFFFVVVVVVVEEEEEEEEEWWWWWWWWWWWWWWIIIIIIIIPPPPPPPHHHHHHHHHHNNNNNNNNIIIIIIIIKKKKKKKKKTTTTTTTSSSSSSVVVVVVVCCCCCCDDDDDDDDIIIIIIIIPPPPPPPAAAAAAAAAAGGGGEEEEEEEEEKKKKKKKKKIIIIIIIISSSSSSSSSSSSAAAAAFFFFFFFFFFFIIIIIIIIGGGGNNNNNNNNTTTTTTTTTTTTTTAAAAAIIIIIIIIEEEEEEEEEAAAAATTTTTTTFFFFFFFFFFFKKKKKKKKKRRRRRRRRRRRFFFFFFFFFFFGGGGNNNNNNNNQQQQQQQQQFFFFFFFFFFFRRRRRRRRRRRSSSSSSMMMMMMMMFFFFFFFFFFFRRRRRRRRRRRRRRRRRRRRRRKKKKKKKKKAAAAAFFFFFFFFFFFLLLLLLLLHHHHHHHHHHWWWWWWWWWWWWWWYYYYYYYYYYYYKKKKKKKKKSSSSSSEEEEEEEEEGGGGMMMMMMMMDDDDDDDDEEEEEEEEELLLLLLLLEEEEEEEEEFFFFFFFFFFFSSSSSSEEEEEEEEEAAAAAEEEEEEEEESSSSSSNNNNNNNNLLLLLLLLAAAAADDDDDDDDLLLLLLLLVVVVVVVSSSSSSEEEEEEEEEYYYYYYYYYYYYQQQQQQQQQQQQQQQQQQYYYYYYYYYYYYGGGGEEEEEEEEEAAAAATTTTTTTAAAAADDDDDDDDGGGGVVVVVVVEEEEEEEEEGGGGYYYYYYYYYYYYEEEEEEEEEEEEEEEEEEEEEEEEEEEGGGGYYYYYYYYYYYYEEEEEEEEENNNNNNNNDDDDDDDDHHHHHHHHHHPPPPPPPEEEEEEEEEDDDDDDDDDDDDDDDDEEEEEEEEEEEEEEEEEEE

SEQ ID NO: 112 - protein, 3520 aa, Glomerella cingulata
MMMMMMMMRRRRRRRRRRREEEEEEEEEIIIIIIIIIIIIIIIIHHHHHHHHHHLLLLLLLLQQQQQQQQQTTTTTTTGGGGQQQQQQQQQCCCCCCLLLLLLLLIIIIIIIIQQQQQQQQQGGGGNNNNNNNNQQQQQQQQQVVVVVVVGGGGTTTTTTTAAAAAFFFFFFFFFFFWWWWWWWWWWWWWWQQQQQQQQQTTTTTTTIIIIIIIIHHHHHHHHHHHHHHHHHHHHEEEEEEEEEHHHHHHHHHHGGGGLLLLLLLLDDDDDDDDHHHHHHHHHHDDDDDDDDGGGGYYYYYYYYYYYYFFFFFFFFFFFRRRRRRRRRRRGGGGEEEEEEEEESSSSSSTTTTTTTQQQQQQQQQQQQQQQQQQSSSSSSDDDDDDDDRRRRRRRRRRRLLLLLLLLSSSSSSVVVVVVVYYYYYYYYYYYYFFFFFFFFFFFAAAAAEEEEEEEEEAAAAASSSSSSNNNNNNNNNNNNNNNNKKKKKKKKKYYYYYYYYYYYYVVVVVVVPPPPPPPRRRRRRRRRRRAAAAAVVVVVVVLLLLLLLLVVVVVVVDDDDDDDDLLLLLLLLEEEEEEEEEPPPPPPPAAAAATTTTTTTMMMMMMMMDDDDDDDDAAAAAIIIIIIIIRRRRRRRRRRRSSSSSSGGGGPPPPPPPLLLLLLLLGGGGNNNNNNNNFFFFFFFFFFFFFFFFFFFFFFRRRRRRRRRRRPPPPPPPDDDDDDDDNNNNNNNNMMMMMMMMVVVVVVVHHHHHHHHHHGGGGQQQQQQQQQSSSSSSGGGGAAAAAGGGGNNNNNNNNNNNNNNNNWWWWWWWWWWWWWWAAAAAKKKKKKKKKGGGGHHHHHHHHHHYYYYYYYYYYYYTTTTTTTEEEEEEEEEGGGGAAAAAEEEEEEEEELLLLLLLLVVVVVVVDDDDDDDDQQQQQQQQQVVVVVVVLLLLLLLLDDDDDDDDVVVVVVVVVVVVVVRRRRRRRRRRRRRRRRRRRRRREEEEEEEEEAAAAAEEEEEEEEETTTTTTTCCCCCCDDDDDDDDSSSSSSLLLLLLLLQQQQQQQQQGGGGFFFFFFFFFFFQQQQQQQQQIIIIIIIITTTTTTTHHHHHHHHHHSSSSSSLLLLLLLLGGGGGGGGGGGGTTTTTTTGGGGSSSSSSGGGGMMMMMMMMGGGGTTTTTTTLLLLLLLLLLLLLLLLIIIIIIIIAAAAAKKKKKKKKKVVVVVVVRRRRRRRRRRREEEEEEEEEEEEEEEEEEFFFFFFFFFFFPPPPPPPDDDDDDDDRRRRRRRRRRRMMMMMMMMMMMMMMMMAAAAATTTTTTTFFFFFFFFFFFSSSSSSVVVVVVVLLLLLLLLPPPPPPPSSSSSSPPPPPPPKKKKKKKKKVVVVVVVSSSSSSEEEEEEEEEVVVVVVVVVVVVVVVVVVVVVEEEEEEEEEPPPPPPPYYYYYYYYYYYYNNNNNNNNAAAAATTTTTTTLLLLLLLLSSSSSSVVVVVVVHHHHHHHHHHQQQQQQQQQLLLLLLLLVVVVVVVEEEEEEEEENNNNNNNNSSSSSSDDDDDDDDEEEEEEEEETTTTTTTFFFFFFFFFFFCCCCCCIIIIIIIIDDDDDDDDNNNNNNNNEEEEEEEEEAAAAALLLLLLLLYYYYYYYYYYYYDDDDDDDDIIIIIIIICCCCCCRRRRRRRRRRRRRRRRRRRRRRTTTTTTTLLLLLLLLKKKKKKKKKQQQQQQQQQAAAAAHHHHHHHHHHPPPPPPPSSSSSSYYYYYYYYYYYYGGGGDDDDDDDDLLLLLLLLNNNNNNNNKKKKKKKKKLLLLLLLLVVVVVVVSSSSSSRRRRRRRRRRRVVVVVVVMMMMMMMMSSSSSSGGGGLLLLLLLLTTTTTTTTTTTTTTGGGGFFFFFFFFFFFRRRRRRRRRRRFFFFFFFFFFFPPPPPPPGGGGQQQQQQQQQLLLLLLLLNNNNNNNNAAAAADDDDDDDDLLLLLLLLRRRRRRRRRRRKKKKKKKKKLLLLLLLLAAAAAVVVVVVVNNNNNNNNLLLLLLLLVVVVVVVPPPPPPPFFFFFFFFFFFPPPPPPPRRRRRRRRRRRLLLLLLLLHHHHHHHHHHFFFFFFFFFFFFFFFFFFFFFFTTTTTTTVVVVVVVGGGGFFFFFFFFFFFAAAAAPPPPPPPLLLLLLLLTTTTTTTTTTTTTTAAAAAAAAAAAAAAAYYYYYYYYYYYYQQQQQQQQQNNNNNNNNLLLLLLLLGGGGVVVVVVVAAAAAEEEEEEEEELLLLLLLLTTTTTTTQQQQQQQQQQQQQQQQQQMMMMMMMMFFFFFFFFFFFDDDDDDDDPPPPPPPKKKKKKKKKNNNNNNNNVVVVVVVMMMMMMMMSSSSSSAAAAASSSSSSDDDDDDDDFFFFFFFFFFFRRRRRRRRRRRNNNNNNNNGGGGRRRRRRRRRRRFFFFFFFFFFFLLLLLLLLTTTTTTTCCCCCCSSSSSSAAAAAIIIIIIIIYYYYYYYYYYYYRRRRRRRRRRRGGGGKKKKKKKKKVVVVVVVSSSSSSTTTTTTTKKKKKKKKKQQQQQQQQQIIIIIIIIEEEEEEEEEEEEEEEEEEQQQQQQQQQIIIIIIIIRRRRRRRRRRRGGGGVVVVVVVQQQQQQQQQAAAAAKKKKKKKKKNNNNNNNNSSSSSSAAAAAYYYYYYYYYYYYFFFFFFFFFFFVVVVVVVEEEEEEEEEWWWWWWWWWWWWWWIIIIIIIIPPPPPPPNNNNNNNNNNNNNNNNVVVVVVVQQQQQQQQQTTTTTTTAAAAAHHHHHHHHHHCCCCCCSSSSSSIIIIIIIIPPPPPPPPPPPPPPVVVVVVVGGGGMMMMMMMMNNNNNNNNAAAAASSSSSSSSSSSSTTTTTTTFFFFFFFFFFFIIIIIIIIGGGGNNNNNNNNSSSSSSTTTTTTTAAAAAIIIIIIIIQQQQQQQQQDDDDDDDDIIIIIIIIFFFFFFFFFFFRRRRRRRRRRRRRRRRRRRRRRVVVVVVVGGGGDDDDDDDDQQQQQQQQQFFFFFFFFFFFSSSSSSVVVVVVVMMMMMMMMFFFFFFFFFFFRRRRRRRRRRRRRRRRRRRRRRKKKKKKKKKAAAAAFFFFFFFFFFFLLLLLLLLHHHHHHHHHHWWWWWWWWWWWWWWYYYYYYYYYYYYTTTTTTTGGGGEEEEEEEEEGGGGMMMMMMMMDDDDDDDDEEEEEEEEEMMMMMMMMEEEEEEEEEFFFFFFFFFFFTTTTTTTEEEEEEEEEAAAAAEEEEEEEEESSSSSSNNNNNNNNMMMMMMMMNNNNNNNNDDDDDDDDLLLLLLLLVVVVVVVSSSSSSEEEEEEEEEYYYYYYYYYYYYQQQQQQQQQQQQQQQQQQYYYYYYYYYYYYQQQQQQQQQDDDDDDDDAAAAAGGGGMMMMMMMMDDDDDDDDDDDDDDDDDDDDDDDDEEEEEEEEEAAAAAEEEEEEEEEEEEEEEEEEAAAAAYYYYYYYYYYYYEEEEEEEEEEEEEEEEEEEEEEEEEEEEEEEEEEEEPPPPPPPVVVVVVVEEEEEEEEEEEEEEEEEEE

SEQ ID NO: 113 - protein, 3493 aa, Glomerella graminicola
MMMMMMMMRRRRRRRRRRREEEEEEEEEIIIIIIIIIIIIIIIIHHHHHHHHHHLLLLLLLLQQQQQQQQQTTTTTTTGGGGQQQQQQQQQCCCCCCGGGGNNNNNNNNQQQQQQQQQVVVVVVVGGGGTTTTTTTAAAAAFFFFFFFFFFFWWWWWWWWWWWWWWQQQQQQQQQTTTTTTTIIIIIIIIHHHHHHHHHHGGGGEEEEEEEEEHHHHHHHHHHGGGGLLLLLLLLDDDDDDDDQQQQQQQQQDDDDDDDDGGGGVVVVVVVFFFFFFFFFFFRRRRRRRRRRRGGGGSSSSSSDDDDDDDDEEEEEEEEEQQQQQQQQQQQQQQQQQQSSSSSSEEEEEEEEERRRRRRRRRRRLLLLLLLLSSSSSSVVVVVVVYYYYYYYYYYYYFFFFFFFFFFFTTTTTTTEEEEEEEEEAAAAAAAAAAKKKKKKKKKQQQQQQQQQKKKKKKKKKYYYYYYYYYYYYVVVVVVVPPPPPPPRRRRRRRRRRRAAAAAVVVVVVVLLLLLLLLVVVVVVVDDDDDDDDLLLLLLLLEEEEEEEEEPPPPPPPAAAAATTTTTTTMMMMMMMMDDDDDDDDAAAAAIIIIIIIIRRRRRRRRRRRSSSSSSGGGGPPPPPPPLLLLLLLLGGGGDDDDDDDDFFFFFFFFFFFFFFFFFFFFFFRRRRRRRRRRRPPPPPPPDDDDDDDDNNNNNNNNMMMMMMMMVVVVVVVYYYYYYYYYYYYGGGGQQQQQQQQQSSSSSSGGGGAAAAAGGGGNNNNNNNNNNNNNNNNWWWWWWWWWWWWWWAAAAAKKKKKKKKKGGGGHHHHHHHHHHYYYYYYYYYYYYTTTTTTTEEEEEEEEEGGGGAAAAAEEEEEEEEELLLLLLLLVVVVVVVDDDDDDDDQQQQQQQQQVVVVVVVLLLLLLLLDDDDDDDDVVVVVVVVVVVVVVRRRRRRRRRRRRRRRRRRRRRREEEEEEEEEAAAAAEEEEEEEEEAAAAACCCCCCDDDDDDDDSSSSSSLLLLLLLLQQQQQQQQQGGGGFFFFFFFFFFFQQQQQQQQQIIIIIIIITTTTTTTHHHHHHHHHHSSSSSSLLLLLLLLGGGGGGGGGGGGTTTTTTTGGGGSSSSSSGGGGMMMMMMMMGGGGTTTTTTTLLLLLLLLLLLLLLLLIIIIIIIIAAAAAKKKKKKKKKVVVVVVVRRRRRRRRRRREEEEEEEEEEEEEEEEEEFFFFFFFFFFFPPPPPPPDDDDDDDDRRRRRRRRRRRMMMMMMMMMMMMMMMMAAAAATTTTTTTFFFFFFFFFFFSSSSSSVVVVVVVLLLLLLLLPPPPPPPSSSSSSAAAAAKKKKKKKKKVVVVVVVSSSSSSEEEEEEEEEVVVVVVVVVVVVVVVVVVVVVEEEEEEEEEPPPPPPPYYYYYYYYYYYYNNNNNNNNAAAAATTTTTTTLLLLLLLLSSSSSSIIIIIIIIHHHHHHHHHHQQQQQQQQQLLLLLLLLVVVVVVVEEEEEEEEENNNNNNNNSSSSSSDDDDDDDDEEEEEEEEETTTTTTTFFFFFFFFFFFCCCCCCIIIIIIIIDDDDDDDDNNNNNNNNEEEEEEEEEAAAAALLLLLLLLYYYYYYYYYYYYDDDDDDDDIIIIIIIICCCCCCRRRRRRRRRRRRRRRRRRRRRRTTTTTTTLLLLLLLLKKKKKKKKKQQQQQQQQQAAAAAHHHHHHHHHHPPPPPPPSSSSSSYYYYYYYYYYYYGGGGHHHHHHHHHHLLLLLLLLNNNNNNNNHHHHHHHHHHLLLLLLLLVVVVVVVSSSSSSRRRRRRRRRRRVVVVVVVMMMMMMMMSSSSSSGGGGLLLLLLLLTTTTTTTTTTTTTTGGGGFFFFFFFFFFFRRRRRRRRRRRFFFFFFFFFFFPPPPPPPGGGGQQQQQQQQQLLLLLLLLNNNNNNNNAAAAADDDDDDDDLLLLLLLLRRRRRRRRRRRKKKKKKKKKLLLLLLLLAAAAAVVVVVVVNNNNNNNNLLLLLLLLVVVVVVVPPPPPPPFFFFFFFFFFFPPPPPPPRRRRRRRRRRRLLLLLLLLHHHHHHHHHHFFFFFFFFFFFFFFFFFFFFFFTTTTTTTVVVVVVVGGGGFFFFFFFFFFFAAAAAPPPPPPPLLLLLLLLTTTTTTTSSSSSSSSSSSSAAAAASSSSSSFFFFFFFFFFFSSSSSSNNNNNNNNLLLLLLLLGGGGIIIIIIIIAAAAAEEEEEEEEELLLLLLLLTTTTTTTQQQQQQQQQQQQQQQQQQMMMMMMMMFFFFFFFFFFFDDDDDDDDPPPPPPPKKKKKKKKKNNNNNNNNVVVVVVVMMMMMMMMLLLLLLLLAAAAASSSSSSDDDDDDDDFFFFFFFFFFFRRRRRRRRRRRDDDDDDDDGGGGRRRRRRRRRRRFFFFFFFFFFFLLLLLLLLTTTTTTTCCCCCCSSSSSSTTTTTTTMMMMMMMMFFFFFFFFFFFRRRRRRRRRRRGGGGKKKKKKKKKVVVVVVVSSSSSSMMMMMMMMKKKKKKKKKQQQQQQQQQVVVVVVVEEEEEEEEEEEEEEEEEEQQQQQQQQQIIIIIIIIQQQQQQQQQAAAAAIIIIIIIIKKKKKKKKKNNNNNNNNKKKKKKKKKNNNNNNNNSSSSSSAAAAANNNNNNNNFFFFFFFFFFFVVVVVVVEEEEEEEEEWWWWWWWWWWWWWWIIIIIIIIPPPPPPPNNNNNNNNNNNNNNNNIIIIIIIIQQQQQQQQQTTTTTTTAAAAAHHHHHHHHHHCCCCCCSSSSSSVVVVVVVPPPPPPPPPPPPPPKKKKKKKKKGGGGLLLLLLLLDDDDDDDDVVVVVVVSSSSSSSSSSSSTTTTTTTFFFFFFFFFFFIIIIIIIIGGGGNNNNNNNNSSSSSSTTTTTTTAAAAAIIIIIIIIQQQQQQQQQNNNNNNNNSSSSSSFFFFFFFFFFFRRRRRRRRRRRRRRRRRRRRRRVVVVVVVGGGGDDDDDDDDQQQQQQQQQFFFFFFFFFFFSSSSSSLLLLLLLLMMMMMMMMFFFFFFFFFFFRRRRRRRRRRRRRRRRRRRRRRKKKKKKKKKAAAAAFFFFFFFFFFFLLLLLLLLHHHHHHHHHHWWWWWWWWWWWWWWYYYYYYYYYYYYTTTTTTTGGGGEEEEEEEEEGGGGMMMMMMMMDDDDDDDDEEEEEEEEEMMMMMMMMEEEEEEEEEFFFFFFFFFFFTTTTTTTEEEEEEEEEAAAAAEEEEEEEEESSSSSSNNNNNNNNMMMMMMMMNNNNNNNNDDDDDDDDLLLLLLLLVVVVVVVSSSSSSEEEEEEEEEYYYYYYYYYYYYQQQQQQQQQQQQQQQQQQYYYYYYYYYYYYQQQQQQQQQDDDDDDDDAAAAAGGGGMMMMMMMMDDDDDDDDDDDDDDDDEEEEEEEEEYYYYYYYYYYYYGGGGEEEEEEEEEEEEEEEEEEYYYYYYYYYYYYEEEEEEEEEDDDDDDDDEEEEEEEEEAAAAAPPPPPPPAAAAAEEEEEEEEEEEEEEEEEEEEEEEEEEEE

SEQ ID NO: 114 - protein, 3490 aa, Cyanophora paradoxa
MMMMMMMMRRRRRRRRRRREEEEEEEEEIIIIIIIIVVVVVVVHHHHHHHHHHVVVVVVVQQQQQQQQQGGGGGGGGQQQQQQQQQCCCCCCGGGGNNNNNNNNQQQQQQQQQIIIIIIIIGGGGAAAAAKKKKKKKKKFFFFFFFFFFFWWWWWWWWWWWWWWEEEEEEEEEVVVVVVVIIIIIIIISSSSSSDDDDDDDDEEEEEEEEEHHHHHHHHHHGGGGVVVVVVVDDDDDDDDPPPPPPPTTTTTTTGGGGTTTTTTTYYYYYYYYYYYYHHHHHHHHHHGGGGDDDDDDDDSSSSSSDDDDDDDDLLLLLLLLQQQQQQQQQLLLLLLLLEEEEEEEEERRRRRRRRRRRIIIIIIIINNNNNNNNVVVVVVVYYYYYYYYYYYYYYYYYYYYYYYYNNNNNNNNEEEEEEEEEAAAAATTTTTTTGGGGGGGGRRRRRRRRRRRYYYYYYYYYYYYVVVVVVVPPPPPPPRRRRRRRRRRRAAAAAVVVVVVVLLLLLLLLMMMMMMMMDDDDDDDDLLLLLLLLEEEEEEEEEPPPPPPPGGGGTTTTTTTMMMMMMMMDDDDDDDDSSSSSSVVVVVVVRRRRRRRRRRRAAAAAGGGGPPPPPPPYYYYYYYYYYYYGGGGQQQQQQQQQLLLLLLLLFFFFFFFFFFFRRRRRRRRRRRPPPPPPPDDDDDDDDNNNNNNNNFFFFFFFFFFFIIIIIIIIFFFFFFFFFFFGGGGQQQQQQQQQSSSSSSGGGGAAAAAGGGGNNNNNNNNNNNNNNNNWWWWWWWWWWWWWWAAAAAKKKKKKKKKGGGGHHHHHHHHHHYYYYYYYYYYYYTTTTTTTEEEEEEEEEGGGGAAAAAEEEEEEEEELLLLLLLLIIIIIIIIDDDDDDDDSSSSSSVVVVVVVLLLLLLLLDDDDDDDDVVVVVVVVVVVVVVRRRRRRRRRRRKKKKKKKKKEEEEEEEEEAAAAAEEEEEEEEEGGGGCCCCCCDDDDDDDDCCCCCCLLLLLLLLQQQQQQQQQGGGGFFFFFFFFFFFQQQQQQQQQIIIIIIIITTTTTTTHHHHHHHHHHSSSSSSMMMMMMMMGGGGGGGGGGGGTTTTTTTGGGGSSSSSSGGGGMMMMMMMMGGGGTTTTTTTLLLLLLLLLLLLLLLLIIIIIIIIAAAAAKKKKKKKKKVVVVVVVRRRRRRRRRRREEEEEEEEEEEEEEEEEEYYYYYYYYYYYYPPPPPPPDDDDDDDDRRRRRRRRRRRMMMMMMMMMMMMMMMMCCCCCCTTTTTTTYYYYYYYYYYYYSSSSSSVVVVVVVFFFFFFFFFFFPPPPPPPSSSSSSPPPPPPPKKKKKKKKKVVVVVVVSSSSSSDDDDDDDDTTTTTTTVVVVVVVVVVVVVVEEEEEEEEEPPPPPPPYYYYYYYYYYYYNNNNNNNNAAAAATTTTTTTLLLLLLLLSSSSSSVVVVVVVHHHHHHHHHHQQQQQQQQQLLLLLLLLVVVVVVVEEEEEEEEENNNNNNNNAAAAADDDDDDDDEEEEEEEEEVVVVVVVMMMMMMMMVVVVVVVIIIIIIIIDDDDDDDDNNNNNNNNEEEEEEEEEAAAAALLLLLLLLYYYYYYYYYYYYDDDDDDDDIIIIIIIICCCCCCFFFFFFFFFFFRRRRRRRRRRRTTTTTTTLLLLLLLLKKKKKKKKKLLLLLLLLTTTTTTTTTTTTTTPPPPPPPTTTTTTTYYYYYYYYYYYYGGGGDDDDDDDDLLLLLLLLNNNNNNNNHHHHHHHHHHLLLLLLLLVVVVVVVSSSSSSAAAAACCCCCCIIIIIIIISSSSSSGGGGVVVVVVVTTTTTTTCCCCCCCCCCCCLLLLLLLLRRRRRRRRRRRFFFFFFFFFFFPPPPPPPGGGGQQQQQQQQQLLLLLLLLNNNNNNNNSSSSSSDDDDDDDDLLLLLLLLRRRRRRRRRRRKKKKKKKKKLLLLLLLLAAAAAVVVVVVVNNNNNNNNLLLLLLLLIIIIIIIIPPPPPPPFFFFFFFFFFFPPPPPPPRRRRRRRRRRRLLLLLLLLHHHHHHHHHHFFFFFFFFFFFFFFFFFFFFFFMMMMMMMMIIIIIIIIGGGGFFFFFFFFFFFVVVVVVVPPPPPPPLLLLLLLLTTTTTTTSSSSSSRRRRRRRRRRRGGGGSSSSSSQQQQQQQQQQQQQQQQQQYYYYYYYYYYYYRRRRRRRRRRRAAAAALLLLLLLLTTTTTTTVVVVVVVPPPPPPPEEEEEEEEELLLLLLLLTTTTTTTQQQQQQQQQQQQQQQQQQMMMMMMMMFFFFFFFFFFFDDDDDDDDAAAAAKKKKKKKKKNNNNNNNNMMMMMMMMMMMMMMMMCCCCCCAAAAAAAAAADDDDDDDDPPPPPPPRRRRRRRRRRRHHHHHHHHHHGGGGRRRRRRRRRRRYYYYYYYYYYYYLLLLLLLLTTTTTTTAAAAASSSSSSAAAAALLLLLLLLFFFFFFFFFFFRRRRRRRRRRRGGGGRRRRRRRRRRRMMMMMMMMSSSSSSTTTTTTTKKKKKKKKKEEEEEEEEEVVVVVVVDDDDDDDDEEEEEEEEEQQQQQQQQQMMMMMMMMLLLLLLLLNNNNNNNNVVVVVVVQQQQQQQQQNNNNNNNNKKKKKKKKKNNNNNNNNSSSSSSSSSSSSYYYYYYYYYYYYFFFFFFFFFFFVVVVVVVEEEEEEEEEWWWWWWWWWWWWWWIIIIIIIIPPPPPPPNNNNNNNNNNNNNNNNIIIIIIIIKKKKKKKKKAAAAASSSSSSVVVVVVVCCCCCCDDDDDDDDIIIIIIIIPPPPPPPPPPPPPPKKKKKKKKKGGGGLLLLLLLLKKKKKKKKKMMMMMMMMSSSSSSAAAAATTTTTTTFFFFFFFFFFFIIIIIIIIGGGGNNNNNNNNSSSSSSTTTTTTTAAAAAIIIIIIIIQQQQQQQQQEEEEEEEEEMMMMMMMMFFFFFFFFFFFKKKKKKKKKRRRRRRRRRRRVVVVVVVSSSSSSEEEEEEEEEQQQQQQQQQFFFFFFFFFFFTTTTTTTAAAAAMMMMMMMMFFFFFFFFFFFRRRRRRRRRRRRRRRRRRRRRRKKKKKKKKKAAAAAFFFFFFFFFFFLLLLLLLLHHHHHHHHHHWWWWWWWWWWWWWWYYYYYYYYYYYYTTTTTTTGGGGEEEEEEEEEGGGGMMMMMMMMDDDDDDDDEEEEEEEEEMMMMMMMMEEEEEEEEEFFFFFFFFFFFTTTTTTTEEEEEEEEEAAAAAEEEEEEEEESSSSSSNNNNNNNNMMMMMMMMNNNNNNNNDDDDDDDDLLLLLLLLVVVVVVVSSSSSSEEEEEEEEEYYYYYYYYYYYYQQQQQQQQQQQQQQQQQQYYYYYYYYYYYYQQQQQQQQQDDDDDDDDAAAAATTTTTTTAAAAAEEEEEEEEEEEEEEEEEEEEEEEEEEEGGGGEEEEEEEEEGGGGDDDDDDDDEEEEEEEEEEEEEEEEEEEEEEEEEEEAAAAAEEEEEEEEEGGGGEEEEEEEEEAAAAAAAAAAAAAAAA

SEQ ID NO: 115 - protein, 2504 aa, Daucus carota
FFFFFFFFFFFQQQQQQQQQVVVVVVVCCCCCCHHHHHHHHHHSSSSSSLLLLLLLLGGGGGGGGGGGGTTTTTTTGGGGSSSSSSGGGGMMMMMMMMGGGGTTTTTTTLLLLLLLLLLLLLLLLIIIIIIIISSSSSSKKKKKKKKKIIIIIIIIRRRRRRRRRRREEEEEEEEEEEEEEEEEEYYYYYYYYYYYYPPPPPPPDDDDDDDDRRRRRRRRRRRMMMMMMMMMMMMMMMMLLLLLLLLTTTTTTTFFFFFFFFFFFSSSSSSVVVVVVVFFFFFFFFFFFPPPPPPPSSSSSSPPPPPPPKKKKKKKKKVVVVVVVSSSSSSDDDDDDDDTTTTTTTVVVVVVVVVVVVVVEEEEEEEEEPPPPPPPYYYYYYYYYYYYNNNNNNNNAAAAATTTTTTTLLLLLLLLSSSSSSVVVVVVVHHHHHHHHHHQQQQQQQQQLLLLLLLLVVVVVVVEEEEEEEEENNNNNNNNAAAAADDDDDDDDVVVVVVVCCCCCCMMMMMMMMVVVVVVVLLLLLLLLDDDDDDDDNNNNNNNNEEEEEEEEEAAAAALLLLLLLLYYYYYYYYYYYYDDDDDDDDIIIIIIIICCCCCCFFFFFFFFFFFRRRRRRRRRRRTTTTTTTLLLLLLLLKKKKKKKKKLLLLLLLLTTTTTTTTTTTTTTPPPPPPPSSSSSSFFFFFFFFFFFGGGGDDDDDDDDLLLLLLLLNNNNNNNNHHHHHHHHHHLLLLLLLLIIIIIIIISSSSSSAAAAATTTTTTTMMMMMMMMSSSSSSGGGGVVVVVVVTTTTTTTCCCCCCSSSSSSLLLLLLLLRRRRRRRRRRRFFFFFFFFFFFPPPPPPPGGGGQQQQQQQQQLLLLLLLLNNNNNNNNSSSSSSDDDDDDDDLLLLLLLLRRRRRRRRRRRKKKKKKKKKLLLLLLLLAAAAAVVVVVVVIIIIIIIILLLLLLLLIIIIIIIIPPPPPPPFFFFFFFFFFFPPPPPPPRRRRRRRRRRRLLLLLLLLHHHHHHHHHHFFFFFFFFFFFFFFFFFFFFFFMMMMMMMMVVVVVVVGGGGFFFFFFFFFFFAAAAAPPPPPPPLLLLLLLLTTTTTTTSSSSSSRRRRRRRRRRRGGGGSSSSSSQQQQQQQQQQQQQQQQQQYYYYYYYYYYYYRRRRRRRRRRRSSSSSSLLLLLLLLSSSSSSVVVVVVVPPPPPPPEEEEEEEEELLLLLLLLTTTTTTTQQQQQQQQQQQQQQQQQQMMMMMMMMWWWWWWWWWWWWWWDDDDDDDDSSSSSSKKKKKKKKKNNNNNNNNMMMMMMMMMMMMMMMMCCCCCCAAAAAAAAAADDDDDDDDPPPPPPPRRRRRRRRRRRHHHHHHHHHHGGGGRRRRRRRRRRRYYYYYYYYYYYYLLLLLLLLTTTTTTTAAAAASSSSSSAAAAAMMMMMMMMFFFFFFFFFFFRRRRRRRRRRREEEEEEEEEKKKKKKKKKMMMMMMMMSSSSSSTTTTTTTKKKKKKKKKDDDDDDDDLLLLLLLLDDDDDDDDEEEEEEEEEQQQQQQQQQMMMMMMMMIIIIIIIINNNNNNNNVVVVVVVQQQQQQQQQNNNNNNNNKKKKKKKKKNNNNNNNNSSSSSSSSSSSSYYYYYYYYYYYYFFFFFFFFFFFVVVVVVVEEEEEEEEEWWWWWWWWWWWWWWIIIIIIIIPPPPPPPNNNNNNNNNNNNNNNNVVVVVVVKKKKKKKKKSSSSSSTTTTTTTVVVVVVVCCCCCCDDDDDDDDIIIIIIIIPPPPPPPPPPPPPPTTTTTTTGGGGLLLLLLLLKKKKKKKKKMMMMMMMMAAAAASSSSSSTTTTTTTFFFFFFFFFFFIIIIIIIIGGGGNNNNNNNNSSSSSSTTTTTTTSSSSSSIIIIIIIIQQQQQQQQQEEEEEEEEEMMMMMMMMFFFFFFFFFFFRRRRRRRRRRRRRRRRRRRRRRVVVVVVVSSSSSSEEEEEEEEEQQQQQQQQQFFFFFFFFFFFTTTTTTTAAAAAMMMMMMMMFFFFFFFFFFFRRRRRRRRRRRRRRRRRRRRRRKKKKKKKKKAAAAAFFFFFFFFFFFLLLLLLLLHHHHHHHHHHWWWWWWWWWWWWWWYYYYYYYYYYYYTTTTTTTGGGGEEEEEEEEEGGGGMMMMMMMMDDDDDDDDEEEEEEEEEMMMMMMMMEEEEEEEEEFFFFFFFFFFFTTTTTTTEEEEEEEEEAAAAAEEEEEEEEESSSSSSNNNNNNNNMMMMMMMMNNNNNNNNDDDDDDDDLLLLLLLLVVVVVVVSSSSSSEEEEEEEEEYYYYYYYYYYYYQQQQQQQQQQQQQQQQQQYYYYYYYYYYYYQQQQQQQQQDDDDDDDDAAAAATTTTTTTAAAAADDDDDDDDEEEEEEEEEEEEEEEEEEEEEEEEEEEYYYYYYYYYYYYYYYYYYYYYYYYEEEEEEEEEDDDDDDDDEEEEEEEEEEEEEEEEEEEEEEEEEEEEEEEEEEEEEEEEEEEEEAAAAAQQQQQQQQQGGGGMMMMMMMMM

SEQ ID NO: 116 - protein, 3499 aa, Eleusine indica
MMMMMMMMRRRRRRRRRRREEEEEEEEEIIIIIIIILLLLLLLLHHHHHHHHHHIIIIIIIIQQQQQQQQQGGGGGGGGQQQQQQQQQCCCCCCGGGGNNNNNNNNQQQQQQQQQIIIIIIIIGGGGAAAAAKKKKKKKKKFFFFFFFFFFFWWWWWWWWWWWWWWEEEEEEEEEVVVVVVVIIIIIIIICCCCCCDDDDDDDDEEEEEEEEEHHHHHHHHHHGGGGIIIIIIIIDDDDDDDDHHHHHHHHHHTTTTTTTGGGGKKKKKKKKKYYYYYYYYYYYYAAAAAGGGGDDDDDDDDSSSSSSDDDDDDDDLLLLLLLLQQQQQQQQQLLLLLLLLEEEEEEEEERRRRRRRRRRRIIIIIIIINNNNNNNNVVVVVVVYYYYYYYYYYYYYYYYYYYYYYYYNNNNNNNNEEEEEEEEEAAAAASSSSSSGGGGGGGGRRRRRRRRRRRFFFFFFFFFFFVVVVVVVPPPPPPPRRRRRRRRRRRAAAAAVVVVVVVLLLLLLLLMMMMMMMMDDDDDDDDLLLLLLLLEEEEEEEEEPPPPPPPGGGGTTTTTTTMMMMMMMMDDDDDDDDSSSSSSVVVVVVVRRRRRRRRRRRSSSSSSGGGGPPPPPPPFFFFFFFFFFFGGGGQQQQQQQQQIIIIIIIIFFFFFFFFFFFRRRRRRRRRRRPPPPPPPDDDDDDDDNNNNNNNNFFFFFFFFFFFVVVVVVVFFFFFFFFFFFGGGGQQQQQQQQQSSSSSSGGGGAAAAAGGGGNNNNNNNNNNNNNNNNWWWWWWWWWWWWWWAAAAAKKKKKKKKKGGGGHHHHHHHHHHYYYYYYYYYYYYTTTTTTTEEEEEEEEEGGGGAAAAAEEEEEEEEELLLLLLLLIIIIIIIIDDDDDDDDSSSSSSVVVVVVVLLLLLLLLDDDDDDDDVVVVVVVVVVVVVVRRRRRRRRRRRKKKKKKKKKEEEEEEEEEAAAAAEEEEEEEEENNNNNNNNCCCCCCDDDDDDDDCCCCCCLLLLLLLLQQQQQQQQQGGGGFFFFFFFFFFFQQQQQQQQQVVVVVVVCCCCCCHHHHHHHHHHSSSSSSLLLLLLLLGGGGGGGGGGGGTTTTTTTGGGGSSSSSSGGGGMMMMMMMMGGGGTTTTTTTLLLLLLLLLLLLLLLLIIIIIIIISSSSSSKKKKKKKKKIIIIIIIIRRRRRRRRRRREEEEEEEEEEEEEEEEEEYYYYYYYYYYYYPPPPPPPDDDDDDDDRRRRRRRRRRRMMMMMMMMMMMMMMMMLLLLLLLLTTTTTTTFFFFFFFFFFFSSSSSSVVVVVVVFFFFFFFFFFFPPPPPPPSSSSSSPPPPPPPKKKKKKKKKVVVVVVVSSSSSSDDDDDDDDTTTTTTTVVVVVVVVVVVVVVEEEEEEEEEPPPPPPPYYYYYYYYYYYYNNNNNNNNAAAAATTTTTTTLLLLLLLLSSSSSSVVVVVVVHHHHHHHHHHQQQQQQQQQLLLLLLLLVVVVVVVEEEEEEEEENNNNNNNNAAAAADDDDDDDDEEEEEEEEECCCCCCMMMMMMMMVVVVVVVLLLLLLLLDDDDDDDDNNNNNNNNEEEEEEEEEAAAAALLLLLLLLYYYYYYYYYYYYDDDDDDDDIIIIIIIICCCCCCFFFFFFFFFFFRRRRRRRRRRRTTTTTTTLLLLLLLLKKKKKKKKKLLLLLLLLAAAAATTTTTTTPPPPPPPTTTTTTTFFFFFFFFFFFGGGGDDDDDDDDLLLLLLLLNNNNNNNNHHHHHHHHHHLLLLLLLLIIIIIIIISSSSSSAAAAATTTTTTTMMMMMMMMSSSSSSGGGGVVVVVVVTTTTTTTCCCCCCCCCCCCLLLLLLLLRRRRRRRRRRRFFFFFFFFFFFPPPPPPPGGGGQQQQQQQQQLLLLLLLLNNNNNNNNSSSSSSDDDDDDDDLLLLLLLLRRRRRRRRRRRKKKKKKKKKLLLLLLLLAAAAAVVVVVVVNNNNNNNNLLLLLLLLIIIIIIIIPPPPPPPFFFFFFFFFFFPPPPPPPRRRRRRRRRRRLLLLLLLLHHHHHHHHHHFFFFFFFFFFFFFFFFFFFFFFMMMMMMMMVVVVVVVGGGGFFFFFFFFFFFAAAAAPPPPPPPLLLLLLLLTTTTTTTSSSSSSRRRRRRRRRRRGGGGSSSSSSQQQQQQQQQQQQQQQQQQYYYYYYYYYYYYRRRRRRRRRRRAAAAALLLLLLLLTTTTTTTVVVVVVVPPPPPPPEEEEEEEEELLLLLLLLTTTTTTTQQQQQQQQQQQQQQQQQQMMMMMMMMWWWWWWWWWWWWWWDDDDDDDDSSSSSSKKKKKKKKKNNNNNNNNMMMMMMMMMMMMMMMMCCCCCCAAAAAAAAAADDDDDDDDPPPPPPPRRRRRRRRRRRHHHHHHHHHHGGGGRRRRRRRRRRRYYYYYYYYYYYYLLLLLLLLTTTTTTTAAAAASSSSSSAAAAAMMMMMMMMFFFFFFFFFFFRRRRRRRRRRRGGGGKKKKKKKKKMMMMMMMMSSSSSSTTTTTTTKKKKKKKKKEEEEEEEEEVVVVVVVDDDDDDDDEEEEEEEEEQQQQQQQQQMMMMMMMMLLLLLLLLNNNNNNNNVVVVVVVQQQQQQQQQNNNNNNNNKKKKKKKKKNNNNNNNNSSSSSSSSSSSSYYYYYYYYYYYYFFFFFFFFFFFVVVVVVVEEEEEEEEEWWWWWWWWWWWWWWIIIIIIIIPPPPPPPNNNNNNNNNNNNNNNNVVVVVVVKKKKKKKKKSSSSSSSSSSSSVVVVVVVCCCCCCDDDDDDDDIIIIIIIIPPPPPPPPPPPPPPNNNNNNNNGGGGLLLLLLLLKKKKKKKKKMMMMMMMMAAAAASSSSSSTTTTTTTFFFFFFFFFFFIIIIIIIIGGGGNNNNNNNNSSSSSSTTTTTTTSSSSSSIIIIIIIIQQQQQQQQQEEEEEEEEEMMMMMMMMFFFFFFFFFFFRRRRRRRRRRRRRRRRRRRRRRVVVVVVVSSSSSSEEEEEEEEEQQQQQQQQQFFFFFFFFFFFTTTTTTTAAAAAMMMMMMMMFFFFFFFFFFFRRRRRRRRRRRRRRRRRRRRRRKKKKKKKKKAAAAAFFFFFFFFFFFLLLLLLLLHHHHHHHHHHWWWWWWWWWWWWWWYYYYYYYYYYYYTTTTTTTGGGGEEEEEEEEEGGGGMMMMMMMMDDDDDDDDEEEEEEEEEMMMMMMMMEEEEEEEEEFFFFFFFFFFFTTTTTTTEEEEEEEEEAAAAAEEEEEEEEESSSSSSNNNNNNNNMMMMMMMMNNNNNNNNDDDDDDDDLLLLLLLLVVVVVVVAAAAAEEEEEEEEEYYYYYYYYYYYYQQQQQQQQQQQQQQQQQQYYYYYYYYYYYYQQQQQQQQQDDDDDDDDAAAAATTTTTTTAAAAAEEEEEEEEEDDDDDDDDEEEEEEEEEEEEEEEEEEEEEEEEEEEYYYYYYYYYYYYEEEEEEEEEDDDDDDDDEEEEEEEEEEEEEEEEEEEEEEEEEEEEEEEEEEEEMMMMMMMMAAAAAAAAAAA

SEQ ID NO: 117 - protein, 3494 aa, Emericella nidulans
MMMMMMMMRRRRRRRRRRREEEEEEEEEIIIIIIIIVVVVVVVHHHHHHHHHHLLLLLLLLQQQQQQQQQTTTTTTTGGGGQQQQQQQQQCCCCCCGGGGNNNNNNNNQQQQQQQQQIIIIIIIIGGGGAAAAAAAAAAFFFFFFFFFFFWWWWWWWWWWWWWWQQQQQQQQQTTTTTTTIIIIIIIISSSSSSGGGGEEEEEEEEEHHHHHHHHHHGGGGLLLLLLLLDDDDDDDDGGGGSSSSSSGGGGVVVVVVVYYYYYYYYYYYYNNNNNNNNGGGGTTTTTTTSSSSSSDDDDDDDDLLLLLLLLQQQQQQQQQLLLLLLLLEEEEEEEEERRRRRRRRRRRMMMMMMMMNNNNNNNNVVVVVVVYYYYYYYYYYYYFFFFFFFFFFFNNNNNNNNEEEEEEEEEAAAAASSSSSSGGGGNNNNNNNNKKKKKKKKKYYYYYYYYYYYYVVVVVVVPPPPPPPRRRRRRRRRRRAAAAAVVVVVVVLLLLLLLLVVVVVVVDDDDDDDDLLLLLLLLEEEEEEEEEPPPPPPPGGGGTTTTTTTMMMMMMMMDDDDDDDDAAAAAVVVVVVVRRRRRRRRRRRAAAAAGGGGPPPPPPPFFFFFFFFFFFGGGGEEEEEEEEELLLLLLLLFFFFFFFFFFFRRRRRRRRRRRPPPPPPPDDDDDDDDNNNNNNNNFFFFFFFFFFFVVVVVVVFFFFFFFFFFFGGGGQQQQQQQQQSSSSSSGGGGAAAAAGGGGNNNNNNNNNNNNNNNNWWWWWWWWWWWWWWAAAAAKKKKKKKKKGGGGHHHHHHHHHHYYYYYYYYYYYYTTTTTTTEEEEEEEEEGGGGAAAAAEEEEEEEEELLLLLLLLVVVVVVVDDDDDDDDNNNNNNNNVVVVVVVVVVVVVVDDDDDDDDVVVVVVVVVVVVVVRRRRRRRRRRRRRRRRRRRRRREEEEEEEEEAAAAAEEEEEEEEEGGGGCCCCCCDDDDDDDDCCCCCCLLLLLLLLQQQQQQQQQGGGGFFFFFFFFFFFQQQQQQQQQIIIIIIIITTTTTTTHHHHHHHHHHSSSSSSLLLLLLLLGGGGGGGGGGGGTTTTTTTGGGGAAAAAGGGGMMMMMMMMGGGGTTTTTTTLLLLLLLLLLLLLLLLIIIIIIIISSSSSSKKKKKKKKKIIIIIIIIRRRRRRRRRRREEEEEEEEEEEEEEEEEEFFFFFFFFFFFPPPPPPPDDDDDDDDRRRRRRRRRRRMMMMMMMMMMMMMMMMAAAAATTTTTTTFFFFFFFFFFFSSSSSSVVVVVVVVVVVVVVPPPPPPPSSSSSSPPPPPPPKKKKKKKKKVVVVVVVSSSSSSDDDDDDDDTTTTTTTVVVVVVVVVVVVVVEEEEEEEEEPPPPPPPYYYYYYYYYYYYNNNNNNNNAAAAATTTTTTTLLLLLLLLSSSSSSVVVVVVVHHHHHHHHHHQQQQQQQQQLLLLLLLLVVVVVVVEEEEEEEEEHHHHHHHHHHSSSSSSDDDDDDDDEEEEEEEEETTTTTTTFFFFFFFFFFFCCCCCCIIIIIIIIDDDDDDDDNNNNNNNNEEEEEEEEEAAAAALLLLLLLLYYYYYYYYYYYYDDDDDDDDIIIIIIIICCCCCCMMMMMMMMRRRRRRRRRRRTTTTTTTLLLLLLLLKKKKKKKKKLLLLLLLLSSSSSSNNNNNNNNPPPPPPPSSSSSSYYYYYYYYYYYYGGGGDDDDDDDDLLLLLLLLNNNNNNNNHHHHHHHHHHLLLLLLLLVVVVVVVSSSSSSAAAAAVVVVVVVMMMMMMMMSSSSSSGGGGVVVVVVVTTTTTTTTTTTTTTCCCCCCLLLLLLLLRRRRRRRRRRRFFFFFFFFFFFPPPPPPPGGGGQQQQQQQQQLLLLLLLLNNNNNNNNSSSSSSDDDDDDDDLLLLLLLLRRRRRRRRRRRKKKKKKKKKLLLLLLLLAAAAAVVVVVVVNNNNNNNNMMMMMMMMVVVVVVVPPPPPPPFFFFFFFFFFFPPPPPPPRRRRRRRRRRRLLLLLLLLHHHHHHHHHHFFFFFFFFFFFFFFFFFFFFFFMMMMMMMMVVVVVVVGGGGFFFFFFFFFFFAAAAAPPPPPPPLLLLLLLLTTTTTTTSSSSSSRRRRRRRRRRRGGGGAAAAAYYYYYYYYYYYYSSSSSSFFFFFFFFFFFRRRRRRRRRRRAAAAAVVVVVVVSSSSSSVVVVVVVPPPPPPPEEEEEEEEELLLLLLLLTTTTTTTQQQQQQQQQQQQQQQQQQMMMMMMMMFFFFFFFFFFFDDDDDDDDPPPPPPPKKKKKKKKKNNNNNNNNMMMMMMMMMMMMMMMMAAAAAAAAAASSSSSSDDDDDDDDFFFFFFFFFFFRRRRRRRRRRRNNNNNNNNGGGGRRRRRRRRRRRYYYYYYYYYYYYLLLLLLLLTTTTTTTCCCCCCSSSSSSAAAAAIIIIIIIIFFFFFFFFFFFRRRRRRRRRRRGGGGKKKKKKKKKVVVVVVVSSSSSSMMMMMMMMKKKKKKKKKEEEEEEEEEVVVVVVVEEEEEEEEEDDDDDDDDQQQQQQQQQMMMMMMMMRRRRRRRRRRRNNNNNNNNIIIIIIIIQQQQQQQQQSSSSSSKKKKKKKKKNNNNNNNNQQQQQQQQQSSSSSSYYYYYYYYYYYYFFFFFFFFFFFVVVVVVVEEEEEEEEEWWWWWWWWWWWWWWIIIIIIIIPPPPPPPNNNNNNNNNNNNNNNNIIIIIIIIQQQQQQQQQTTTTTTTAAAAALLLLLLLLCCCCCCSSSSSSIIIIIIIIPPPPPPPPPPPPPPRRRRRRRRRRRGGGGLLLLLLLLKKKKKKKKKMMMMMMMMSSSSSSSSSSSSTTTTTTTFFFFFFFFFFFIIIIIIIIGGGGNNNNNNNNSSSSSSTTTTTTTSSSSSSIIIIIIIIQQQQQQQQQEEEEEEEEELLLLLLLLFFFFFFFFFFFKKKKKKKKKRRRRRRRRRRRVVVVVVVGGGGDDDDDDDDQQQQQQQQQFFFFFFFFFFFTTTTTTTAAAAAMMMMMMMMFFFFFFFFFFFRRRRRRRRRRRRRRRRRRRRRRKKKKKKKKKAAAAAFFFFFFFFFFFLLLLLLLLHHHHHHHHHHWWWWWWWWWWWWWWYYYYYYYYYYYYTTTTTTTGGGGEEEEEEEEEGGGGMMMMMMMMDDDDDDDDEEEEEEEEEMMMMMMMMEEEEEEEEEFFFFFFFFFFFTTTTTTTEEEEEEEEEAAAAAEEEEEEEEESSSSSSNNNNNNNNMMMMMMMMNNNNNNNNDDDDDDDDLLLLLLLLVVVVVVVSSSSSSEEEEEEEEEYYYYYYYYYYYYQQQQQQQQQQQQQQQQQQYYYYYYYYYYYYQQQQQQQQQDDDDDDDDAAAAASSSSSSIIIIIIIISSSSSSEEEEEEEEEGGGGEEEEEEEEEEEEEEEEEEEEEEEEEEEYYYYYYYYYYYYAAAAAEEEEEEEEEEEEEEEEEEEEEEEEEEEIIIIIIIIMMMMMMMMEEEEEEEEEGGGGEEEEEEEEEEEEEEEEEEE

SEQ ID NO: 118 - protein, 3490 aa, Gadus morhua
MMMMMMMMRRRRRRRRRRREEEEEEEEEIIIIIIIIVVVVVVVHHHHHHHHHHLLLLLLLLQQQQQQQQQAAAAAGGGGQQQQQQQQQCCCCCCGGGGNNNNNNNNQQQQQQQQQIIIIIIIIGGGGAAAAAKKKKKKKKKFFFFFFFFFFFWWWWWWWWWWWWWWEEEEEEEEEVVVVVVVIIIIIIIISSSSSSDDDDDDDDEEEEEEEEEHHHHHHHHHHGGGGIIIIIIIIDDDDDDDDPPPPPPPTTTTTTTGGGGTTTTTTTYYYYYYYYYYYYHHHHHHHHHHGGGGDDDDDDDDSSSSSSDDDDDDDDLLLLLLLLQQQQQQQQQLLLLLLLLDDDDDDDDRRRRRRRRRRRIIIIIIIINNNNNNNNVVVVVVVYYYYYYYYYYYYYYYYYYYYYYYYNNNNNNNNEEEEEEEEEAAAAASSSSSSGGGGGGGGKKKKKKKKKYYYYYYYYYYYYVVVVVVVPPPPPPPRRRRRRRRRRRAAAAAVVVVVVVLLLLLLLLVVVVVVVDDDDDDDDLLLLLLLLEEEEEEEEEPPPPPPPGGGGTTTTTTTMMMMMMMMDDDDDDDDSSSSSSVVVVVVVRRRRRRRRRRRSSSSSSGGGGAAAAAFFFFFFFFFFFGGGGQQQQQQQQQVVVVVVVFFFFFFFFFFFRRRRRRRRRRRPPPPPPPDDDDDDDDNNNNNNNNFFFFFFFFFFFVVVVVVVFFFFFFFFFFFGGGGQQQQQQQQQSSSSSSGGGGAAAAAGGGGNNNNNNNNNNNNNNNNWWWWWWWWWWWWWWAAAAAKKKKKKKKKGGGGHHHHHHHHHHYYYYYYYYYYYYTTTTTTTEEEEEEEEEGGGGAAAAAEEEEEEEEELLLLLLLLVVVVVVVDDDDDDDDSSSSSSVVVVVVVLLLLLLLLDDDDDDDDVVVVVVVVVVVVVVRRRRRRRRRRRKKKKKKKKKEEEEEEEEEAAAAAEEEEEEEEESSSSSSCCCCCCDDDDDDDDCCCCCCLLLLLLLLQQQQQQQQQGGGGFFFFFFFFFFFQQQQQQQQQLLLLLLLLTTTTTTTHHHHHHHHHHSSSSSSLLLLLLLLGGGGGGGGGGGGTTTTTTTGGGGSSSSSSGGGGMMMMMMMMGGGGTTTTTTTLLLLLLLLLLLLLLLLIIIIIIIISSSSSSKKKKKKKKKIIIIIIIIRRRRRRRRRRREEEEEEEEEEEEEEEEEEYYYYYYYYYYYYPPPPPPPDDDDDDDDRRRRRRRRRRRIIIIIIIIMMMMMMMMNNNNNNNNTTTTTTTFFFFFFFFFFFSSSSSSVVVVVVVVVVVVVVPPPPPPPSSSSSSPPPPPPPKKKKKKKKKVVVVVVVSSSSSSDDDDDDDDTTTTTTTVVVVVVVVVVVVVVEEEEEEEEEPPPPPPPYYYYYYYYYYYYNNNNNNNNAAAAATTTTTTTLLLLLLLLSSSSSSVVVVVVVHHHHHHHHHHQQQQQQQQQLLLLLLLLVVVVVVVEEEEEEEEENNNNNNNNTTTTTTTDDDDDDDDEEEEEEEEETTTTTTTYYYYYYYYYYYYCCCCCCIIIIIIIIDDDDDDDDNNNNNNNNEEEEEEEEEAAAAALLLLLLLLYYYYYYYYYYYYDDDDDDDDIIIIIIIICCCCCCFFFFFFFFFFFRRRRRRRRRRRTTTTTTTLLLLLLLLKKKKKKKKKLLLLLLLLTTTTTTTTTTTTTTPPPPPPPSSSSSSYYYYYYYYYYYYGGGGDDDDDDDDLLLLLLLLNNNNNNNNHHHHHHHHHHLLLLLLLLVVVVVVVSSSSSSAAAAATTTTTTTMMMMMMMMSSSSSSGGGGVVVVVVVTTTTTTTTTTTTTTCCCCCCLLLLLLLLRRRRRRRRRRRFFFFFFFFFFFPPPPPPPGGGGQQQQQQQQQLLLLLLLLNNNNNNNNAAAAADDDDDDDDLLLLLLLLRRRRRRRRRRRKKKKKKKKKLLLLLLLLAAAAAVVVVVVVNNNNNNNNMMMMMMMMVVVVVVVPPPPPPPFFFFFFFFFFFPPPPPPPRRRRRRRRRRRLLLLLLLLHHHHHHHHHHFFFFFFFFFFFFFFFFFFFFFFMMMMMMMMPPPPPPPGGGGFFFFFFFFFFFAAAAAPPPPPPPLLLLLLLLTTTTTTTSSSSSSRRRRRRRRRRRGGGGSSSSSSQQQQQQQQQQQQQQQQQQYYYYYYYYYYYYRRRRRRRRRRRSSSSSSLLLLLLLLTTTTTTTVVVVVVVPPPPPPPEEEEEEEEELLLLLLLLTTTTTTTQQQQQQQQQQQQQQQQQQMMMMMMMMFFFFFFFFFFFDDDDDDDDGGGGKKKKKKKKKNNNNNNNNMMMMMMMMMMMMMMMMAAAAAAAAAACCCCCCDDDDDDDDPPPPPPPRRRRRRRRRRRHHHHHHHHHHGGGGRRRRRRRRRRRYYYYYYYYYYYYLLLLLLLLTTTTTTTVVVVVVVAAAAAAAAAAIIIIIIIIFFFFFFFFFFFRRRRRRRRRRRGGGGRRRRRRRRRRRMMMMMMMMSSSSSSMMMMMMMMKKKKKKKKKEEEEEEEEEVVVVVVVDDDDDDDDEEEEEEEEEQQQQQQQQQMMMMMMMMLLLLLLLLNNNNNNNNVVVVVVVQQQQQQQQQNNNNNNNNKKKKKKKKKNNNNNNNNSSSSSSSSSSSSYYYYYYYYYYYYFFFFFFFFFFFVVVVVVVEEEEEEEEEWWWWWWWWWWWWWWIIIIIIIIPPPPPPPNNNNNNNNNNNNNNNNVVVVVVVKKKKKKKKKTTTTTTTAAAAAVVVVVVVCCCCCCDDDDDDDDIIIIIIIIPPPPPPPPPPPPPPRRRRRRRRRRRGGGGLLLLLLLLKKKKKKKKKMMMMMMMMAAAAAAAAAATTTTTTTFFFFFFFFFFFIIIIIIIIGGGGNNNNNNNNSSSSSSTTTTTTTAAAAAIIIIIIIIQQQQQQQQQEEEEEEEEELLLLLLLLFFFFFFFFFFFKKKKKKKKKRRRRRRRRRRRIIIIIIIISSSSSSEEEEEEEEEQQQQQQQQQFFFFFFFFFFFTTTTTTTAAAAAMMMMMMMMFFFFFFFFFFFRRRRRRRRRRRRRRRRRRRRRRKKKKKKKKKAAAAAFFFFFFFFFFFLLLLLLLLHHHHHHHHHHWWWWWWWWWWWWWWYYYYYYYYYYYYTTTTTTTGGGGEEEEEEEEEGGGGMMMMMMMMDDDDDDDDEEEEEEEEEMMMMMMMMEEEEEEEEEFFFFFFFFFFFTTTTTTTEEEEEEEEEAAAAAEEEEEEEEESSSSSSNNNNNNNNMMMMMMMMNNNNNNNNDDDDDDDDLLLLLLLLVVVVVVVSSSSSSEEEEEEEEEYYYYYYYYYYYYQQQQQQQQQQQQQQQQQQYYYYYYYYYYYYQQQQQQQQQDDDDDDDDAAAAATTTTTTTAAAAAEEEEEEEEEEEEEEEEEEEEEEEEEEEGGGGEEEEEEEEEFFFFFFFFFFFEEEEEEEEEEEEEEEEEEEEEEEEEEEGGGGEEEEEEEEEEEEEEEEEEEEEEEEEEELLLLLLLLAAAAAA

SEQ ID NO: 119 - protein, 3504 aa, Galactomyces geotrichum
MMMMMMMMRRRRRRRRRRREEEEEEEEEIIIIIIIIIIIIIIIIHHHHHHHHHHVVVVVVVSSSSSSAAAAAGGGGQQQQQQQQQCCCCCCGGGGNNNNNNNNQQQQQQQQQIIIIIIIIGGGGAAAAAAAAAAFFFFFFFFFFFWWWWWWWWWWWWWWEEEEEEEEETTTTTTTIIIIIIIISSSSSSGGGGEEEEEEEEEHHHHHHHHHHGGGGIIIIIIIINNNNNNNNPPPPPPPSSSSSSAAAAAIIIIIIIIYYYYYYYYYYYYEEEEEEEEEGGGGTTTTTTTDDDDDDDDPPPPPPPLLLLLLLLQQQQQQQQQLLLLLLLLEEEEEEEEERRRRRRRRRRRLLLLLLLLSSSSSSVVVVVVVYYYYYYYYYYYYYYYYYYYYYYYYNNNNNNNNEEEEEEEEEAAAAAGGGGNNNNNNNNGGGGKKKKKKKKKYYYYYYYYYYYYVVVVVVVPPPPPPPRRRRRRRRRRRAAAAAVVVVVVVLLLLLLLLVVVVVVVDDDDDDDDLLLLLLLLEEEEEEEEEPPPPPPPGGGGVVVVVVVMMMMMMMMDDDDDDDDAAAAAVVVVVVVRRRRRRRRRRRSSSSSSGGGGTTTTTTTYYYYYYYYYYYYGGGGNNNNNNNNLLLLLLLLFFFFFFFFFFFRRRRRRRRRRRPPPPPPPDDDDDDDDNNNNNNNNFFFFFFFFFFFIIIIIIIIFFFFFFFFFFFGGGGQQQQQQQQQSSSSSSGGGGAAAAAGGGGNNNNNNNNNNNNNNNNWWWWWWWWWWWWWWAAAAAKKKKKKKKKGGGGHHHHHHHHHHYYYYYYYYYYYYTTTTTTTEEEEEEEEEGGGGAAAAAEEEEEEEEELLLLLLLLVVVVVVVDDDDDDDDSSSSSSVVVVVVVLLLLLLLLDDDDDDDDIIIIIIIIVVVVVVVRRRRRRRRRRRRRRRRRRRRRREEEEEEEEEAAAAAEEEEEEEEENNNNNNNNSSSSSSDDDDDDDDSSSSSSLLLLLLLLQQQQQQQQQGGGGFFFFFFFFFFFQQQQQQQQQIIIIIIIISSSSSSHHHHHHHHHHSSSSSSLLLLLLLLGGGGGGGGGGGGTTTTTTTGGGGSSSSSSGGGGMMMMMMMMGGGGTTTTTTTLLLLLLLLLLLLLLLLIIIIIIIISSSSSSKKKKKKKKKIIIIIIIIRRRRRRRRRRREEEEEEEEEEEEEEEEEEYYYYYYYYYYYYPPPPPPPDDDDDDDDRRRRRRRRRRRMMMMMMMMMMMMMMMMAAAAATTTTTTTFFFFFFFFFFFSSSSSSVVVVVVVVVVVVVVPPPPPPPSSSSSSPPPPPPPKKKKKKKKKVVVVVVVSSSSSSDDDDDDDDTTTTTTTIIIIIIIIVVVVVVVEEEEEEEEEPPPPPPPYYYYYYYYYYYYNNNNNNNNAAAAATTTTTTTLLLLLLLLSSSSSSVVVVVVVHHHHHHHHHHQQQQQQQQQLLLLLLLLIIIIIIIIEEEEEEEEENNNNNNNNAAAAADDDDDDDDEEEEEEEEETTTTTTTFFFFFFFFFFFCCCCCCIIIIIIIIDDDDDDDDNNNNNNNNEEEEEEEEEAAAAALLLLLLLLYYYYYYYYYYYYDDDDDDDDIIIIIIIICCCCCCQQQQQQQQQHHHHHHHHHHTTTTTTTLLLLLLLLKKKKKKKKKLLLLLLLLKKKKKKKKKQQQQQQQQQPPPPPPPTTTTTTTHHHHHHHHHHAAAAADDDDDDDDLLLLLLLLNNNNNNNNQQQQQQQQQLLLLLLLLVVVVVVVSSSSSSGGGGVVVVVVVMMMMMMMMSSSSSSGGGGIIIIIIIITTTTTTTTTTTTTTCCCCCCLLLLLLLLRRRRRRRRRRRFFFFFFFFFFFPPPPPPPGGGGQQQQQQQQQLLLLLLLLNNNNNNNNSSSSSSDDDDDDDDLLLLLLLLRRRRRRRRRRRKKKKKKKKKLLLLLLLLAAAAAVVVVVVVNNNNNNNNLLLLLLLLVVVVVVVPPPPPPPFFFFFFFFFFFPPPPPPPRRRRRRRRRRRLLLLLLLLHHHHHHHHHHFFFFFFFFFFFFFFFFFFFFFFMMMMMMMMVVVVVVVGGGGYYYYYYYYYYYYAAAAAPPPPPPPLLLLLLLLSSSSSSAAAAAPPPPPPPGGGGQQQQQQQQQQQQQQQQQQSSSSSSFFFFFFFFFFFRRRRRRRRRRRSSSSSSLLLLLLLLTTTTTTTVVVVVVVPPPPPPPEEEEEEEEELLLLLLLLTTTTTTTQQQQQQQQQQQQQQQQQQLLLLLLLLFFFFFFFFFFFDDDDDDDDSSSSSSKKKKKKKKKNNNNNNNNMMMMMMMMMMMMMMMMAAAAAAAAAASSSSSSDDDDDDDDPPPPPPPKKKKKKKKKRRRRRRRRRRRGGGGRRRRRRRRRRRYYYYYYYYYYYYLLLLLLLLTTTTTTTVVVVVVVAAAAAAAAAAFFFFFFFFFFFFFFFFFFFFFFRRRRRRRRRRRGGGGKKKKKKKKKVVVVVVVSSSSSSIIIIIIIIKKKKKKKKKEEEEEEEEEVVVVVVVEEEEEEEEEDDDDDDDDQQQQQQQQQMMMMMMMMRRRRRRRRRRRSSSSSSVVVVVVVQQQQQQQQQEEEEEEEEERRRRRRRRRRRNNNNNNNNSSSSSSAAAAAYYYYYYYYYYYYFFFFFFFFFFFVVVVVVVEEEEEEEEEWWWWWWWWWWWWWWIIIIIIIIPPPPPPPNNNNNNNNNNNNNNNNVVVVVVVQQQQQQQQQTTTTTTTAAAAAIIIIIIIICCCCCCSSSSSSVVVVVVVPPPPPPPPPPPPPPKKKKKKKKKDDDDDDDDVVVVVVVKKKKKKKKKMMMMMMMMSSSSSSAAAAATTTTTTTFFFFFFFFFFFIIIIIIIIAAAAANNNNNNNNSSSSSSTTTTTTTSSSSSSIIIIIIIIQQQQQQQQQEEEEEEEEELLLLLLLLFFFFFFFFFFFKKKKKKKKKRRRRRRRRRRRVVVVVVVGGGGDDDDDDDDQQQQQQQQQFFFFFFFFFFFSSSSSSAAAAAMMMMMMMMFFFFFFFFFFFRRRRRRRRRRRRRRRRRRRRRRKKKKKKKKKAAAAAFFFFFFFFFFFLLLLLLLLHHHHHHHHHHWWWWWWWWWWWWWWYYYYYYYYYYYYTTTTTTTNNNNNNNNEEEEEEEEEGGGGMMMMMMMMDDDDDDDDIIIIIIIITTTTTTTEEEEEEEEEFFFFFFFFFFFAAAAAEEEEEEEEEAAAAAEEEEEEEEESSSSSSNNNNNNNNMMMMMMMMNNNNNNNNDDDDDDDDLLLLLLLLVVVVVVVSSSSSSEEEEEEEEEYYYYYYYYYYYYQQQQQQQQQQQQQQQQQQYYYYYYYYYYYYQQQQQQQQQNNNNNNNNAAAAATTTTTTTVVVVVVVDDDDDDDDDDDDDDDDEEEEEEEEEDDDDDDDDMMMMMMMMEEEEEEEEEYYYYYYYYYYYYEEEEEEEEEDDDDDDDDEEEEEEEEELLLLLLLLPPPPPPPLLLLLLLLEEEEEEEEEDDDDDDDDEEEEEEEEEMMMMMMMMM

SEQ ID NO: 120 - protein, 3561 aa, Homarus americanus
MMMMMMMMRRRRRRRRRRREEEEEEEEEIIIIIIIIVVVVVVVHHHHHHHHHHLLLLLLLLQQQQQQQQQTTTTTTTGGGGQQQQQQQQQCCCCCCGGGGNNNNNNNNQQQQQQQQQIIIIIIIIGGGGTTTTTTTKKKKKKKKKFFFFFFFFFFFWWWWWWWWWWWWWWEEEEEEEEEIIIIIIIIIIIIIIIISSSSSSDDDDDDDDEEEEEEEEEHHHHHHHHHHGGGGIIIIIIIIQQQQQQQQQPPPPPPPTTTTTTTGGGGEEEEEEEEEYYYYYYYYYYYYTTTTTTTGGGGAAAAADDDDDDDDKKKKKKKKKDDDDDDDDLLLLLLLLMMMMMMMMEEEEEEEEELLLLLLLLQQQQQQQQQLLLLLLLLEEEEEEEEERRRRRRRRRRRIIIIIIIINNNNNNNNVVVVVVVYYYYYYYYYYYYYYYYYYYYYYYYNNNNNNNNEEEEEEEEEGGGGNNNNNNNNQQQQQQQQQGGGGKKKKKKKKKYYYYYYYYYYYYVVVVVVVPPPPPPPRRRRRRRRRRRAAAAAVVVVVVVLLLLLLLLVVVVVVVDDDDDDDDLLLLLLLLEEEEEEEEEPPPPPPPGGGGTTTTTTTMMMMMMMMDDDDDDDDSSSSSSVVVVVVVRRRRRRRRRRRAAAAAGGGGPPPPPPPHHHHHHHHHHGGGGQQQQQQQQQLLLLLLLLFFFFFFFFFFFKKKKKKKKKPPPPPPPDDDDDDDDSSSSSSFFFFFFFFFFFVVVVVVVFFFFFFFFFFFGGGGQQQQQQQQQSSSSSSGGGGAAAAAGGGGNNNNNNNNNNNNNNNNWWWWWWWWWWWWWWAAAAAKKKKKKKKKGGGGHHHHHHHHHHYYYYYYYYYYYYTTTTTTTEEEEEEEEEGGGGAAAAAEEEEEEEEELLLLLLLLVVVVVVVDDDDDDDDSSSSSSVVVVVVVLLLLLLLLDDDDDDDDVVVVVVVVVVVVVVRRRRRRRRRRRKKKKKKKKKEEEEEEEEEAAAAAEEEEEEEEEKKKKKKKKKCCCCCCDDDDDDDDCCCCCCLLLLLLLLQQQQQQQQQGGGGFFFFFFFFFFFQQQQQQQQQLLLLLLLLTTTTTTTHHHHHHHHHHSSSSSSLLLLLLLLGGGGGGGGGGGGTTTTTTTGGGGSSSSSSGGGGMMMMMMMMGGGGTTTTTTTLLLLLLLLLLLLLLLLVVVVVVVSSSSSSKKKKKKKKKIIIIIIIIRRRRRRRRRRREEEEEEEEEEEEEEEEEEFFFFFFFFFFFPPPPPPPDDDDDDDDRRRRRRRRRRRIIIIIIIIMMMMMMMMNNNNNNNNTTTTTTTFFFFFFFFFFFSSSSSSVVVVVVVVVVVVVVPPPPPPPSSSSSSPPPPPPPKKKKKKKKKVVVVVVVSSSSSSDDDDDDDDTTTTTTTVVVVVVVVVVVVVVEEEEEEEEEPPPPPPPYYYYYYYYYYYYNNNNNNNNAAAAATTTTTTTLLLLLLLLSSSSSSIIIIIIIIHHHHHHHHHHQQQQQQQQQLLLLLLLLVVVVVVVEEEEEEEEENNNNNNNNTTTTTTTDDDDDDDDEEEEEEEEETTTTTTTYYYYYYYYYYYYCCCCCCIIIIIIIIDDDDDDDDNNNNNNNNEEEEEEEEEAAAAALLLLLLLLYYYYYYYYYYYYDDDDDDDDIIIIIIIICCCCCCFFFFFFFFFFFRRRRRRRRRRRTTTTTTTLLLLLLLLKKKKKKKKKLLLLLLLLQQQQQQQQQNNNNNNNNPPPPPPPTTTTTTTYYYYYYYYYYYYGGGGDDDDDDDDLLLLLLLLNNNNNNNNHHHHHHHHHHLLLLLLLLVVVVVVVSSSSSSLLLLLLLLTTTTTTTMMMMMMMMSSSSSSGGGGVVVVVVVTTTTTTTTTTTTTTCCCCCCFFFFFFFFFFFRRRRRRRRRRRFFFFFFFFFFFPPPPPPPGGGGQQQQQQQQQLLLLLLLLNNNNNNNNAAAAADDDDDDDDLLLLLLLLRRRRRRRRRRRKKKKKKKKKLLLLLLLLAAAAAVVVVVVVNNNNNNNNMMMMMMMMVVVVVVVPPPPPPPFFFFFFFFFFFPPPPPPPRRRRRRRRRRRLLLLLLLLHHHHHHHHHHFFFFFFFFFFFFFFFFFFFFFFMMMMMMMMPPPPPPPGGGGFFFFFFFFFFFAAAAAPPPPPPPLLLLLLLLTTTTTTTAAAAARRRRRRRRRRRGGGGSSSSSSQQQQQQQQQQQQQQQQQQYYYYYYYYYYYYRRRRRRRRRRRAAAAALLLLLLLLTTTTTTTVVVVVVVPPPPPPPEEEEEEEEELLLLLLLLTTTTTTTQQQQQQQQQQQQQQQQQQMMMMMMMMFFFFFFFFFFFDDDDDDDDAAAAAKKKKKKKKKNNNNNNNNMMMMMMMMMMMMMMMMAAAAAAAAAACCCCCCDDDDDDDDPPPPPPPRRRRRRRRRRRHHHHHHHHHHGGGGRRRRRRRRRRRYYYYYYYYYYYYLLLLLLLLTTTTTTTVVVVVVVAAAAAAAAAAIIIIIIIIFFFFFFFFFFFRRRRRRRRRRRGGGGRRRRRRRRRRRMMMMMMMMSSSSSSMMMMMMMMKKKKKKKKKEEEEEEEEEVVVVVVVDDDDDDDDEEEEEEEEEQQQQQQQQQMMMMMMMMYYYYYYYYYYYYNNNNNNNNIIIIIIIIQQQQQQQQQNNNNNNNNKKKKKKKKKNNNNNNNNSSSSSSSSSSSSFFFFFFFFFFFFFFFFFFFFFFVVVVVVVEEEEEEEEEWWWWWWWWWWWWWWIIIIIIIIPPPPPPPNNNNNNNNNNNNNNNNVVVVVVVKKKKKKKKKTTTTTTTAAAAAVVVVVVVCCCCCCDDDDDDDDIIIIIIIIPPPPPPPPPPPPPPRRRRRRRRRRRGGGGIIIIIIIIKKKKKKKKKMMMMMMMMAAAAASSSSSSTTTTTTTFFFFFFFFFFFIIIIIIIIGGGGNNNNNNNNSSSSSSTTTTTTTAAAAAIIIIIIIIHHHHHHHHHHEEEEEEEEELLLLLLLLFFFFFFFFFFFKKKKKKKKKRRRRRRRRRRRVVVVVVVGGGGEEEEEEEEEQQQQQQQQQFFFFFFFFFFFTTTTTTTAAAAAMMMMMMMMFFFFFFFFFFFRRRRRRRRRRRRRRRRRRRRRRKKKKKKKKKAAAAAFFFFFFFFFFFLLLLLLLLHHHHHHHHHHWWWWWWWWWWWWWWYYYYYYYYYYYYTTTTTTTGGGGEEEEEEEEEGGGGMMMMMMMMDDDDDDDDEEEEEEEEEMMMMMMMMEEEEEEEEEFFFFFFFFFFFTTTTTTTEEEEEEEEEAAAAAEEEEEEEEESSSSSSNNNNNNNNMMMMMMMMNNNNNNNNDDDDDDDDLLLLLLLLVVVVVVVSSSSSSEEEEEEEEEYYYYYYYYYYYYQQQQQQQQQQQQQQQQQQYYYYYYYYYYYYQQQQQQQQQEEEEEEEEEAAAAATTTTTTTAAAAADDDDDDDDDDDDDDDDEEEEEEEEEAAAAAEEEEEEEEEFFFFFFFFFFFEEEEEEEEEEEEEEEEEEEEEEEEEEEGGGGEEEEEEEEEVVVVVVVEEEEEEEEEGGGGEEEEEEEEEYYYYYYYYYYYYAAAAAA

SEQ ID NO: 121 - protein, 3491 aa, Homo sapiens
MMMMMMMMRRRRRRRRRRREEEEEEEEEIIIIIIIIVVVVVVVHHHHHHHHHHIIIIIIIIQQQQQQQQQAAAAAGGGGQQQQQQQQQCCCCCCGGGGNNNNNNNNQQQQQQQQQIIIIIIIIGGGGAAAAAKKKKKKKKKFFFFFFFFFFFWWWWWWWWWWWWWWEEEEEEEEEVVVVVVVIIIIIIIISSSSSSDDDDDDDDEEEEEEEEEHHHHHHHHHHGGGGIIIIIIIIDDDDDDDDPPPPPPPTTTTTTTGGGGTTTTTTTYYYYYYYYYYYYHHHHHHHHHHGGGGDDDDDDDDSSSSSSDDDDDDDDLLLLLLLLQQQQQQQQQLLLLLLLLDDDDDDDDRRRRRRRRRRRIIIIIIIISSSSSSVVVVVVVYYYYYYYYYYYYYYYYYYYYYYYYNNNNNNNNEEEEEEEEEAAAAATTTTTTTGGGGGGGGKKKKKKKKKYYYYYYYYYYYYVVVVVVVPPPPPPPRRRRRRRRRRRAAAAAIIIIIIIILLLLLLLLVVVVVVVDDDDDDDDLLLLLLLLEEEEEEEEEPPPPPPPGGGGTTTTTTTMMMMMMMMDDDDDDDDSSSSSSVVVVVVVRRRRRRRRRRRSSSSSSGGGGPPPPPPPFFFFFFFFFFFGGGGQQQQQQQQQIIIIIIIIFFFFFFFFFFFRRRRRRRRRRRPPPPPPPDDDDDDDDNNNNNNNNFFFFFFFFFFFVVVVVVVFFFFFFFFFFFGGGGQQQQQQQQQSSSSSSGGGGAAAAAGGGGNNNNNNNNNNNNNNNNWWWWWWWWWWWWWWAAAAAKKKKKKKKKGGGGHHHHHHHHHHYYYYYYYYYYYYTTTTTTTEEEEEEEEEGGGGAAAAAEEEEEEEEELLLLLLLLVVVVVVVDDDDDDDDSSSSSSVVVVVVVLLLLLLLLDDDDDDDDVVVVVVVVVVVVVVRRRRRRRRRRRKKKKKKKKKEEEEEEEEEAAAAAEEEEEEEEESSSSSSCCCCCCDDDDDDDDCCCCCCLLLLLLLLQQQQQQQQQGGGGFFFFFFFFFFFQQQQQQQQQLLLLLLLLTTTTTTTHHHHHHHHHHSSSSSSLLLLLLLLGGGGGGGGGGGGTTTTTTTGGGGSSSSSSGGGGMMMMMMMMGGGGTTTTTTTLLLLLLLLLLLLLLLLIIIIIIIISSSSSSKKKKKKKKKIIIIIIIIRRRRRRRRRRREEEEEEEEEEEEEEEEEEYYYYYYYYYYYYPPPPPPPDDDDDDDDRRRRRRRRRRRIIIIIIIIMMMMMMMMNNNNNNNNTTTTTTTFFFFFFFFFFFSSSSSSVVVVVVVVVVVVVVPPPPPPPSSSSSSPPPPPPPKKKKKKKKKVVVVVVVSSSSSSDDDDDDDDTTTTTTTVVVVVVVVVVVVVVEEEEEEEEEPPPPPPPYYYYYYYYYYYYNNNNNNNNAAAAATTTTTTTLLLLLLLLSSSSSSVVVVVVVHHHHHHHHHHQQQQQQQQQLLLLLLLLVVVVVVVEEEEEEEEENNNNNNNNTTTTTTTDDDDDDDDEEEEEEEEETTTTTTTYYYYYYYYYYYYCCCCCCIIIIIIIIDDDDDDDDNNNNNNNNEEEEEEEEEAAAAALLLLLLLLYYYYYYYYYYYYDDDDDDDDIIIIIIIICCCCCCFFFFFFFFFFFRRRRRRRRRRRTTTTTTTLLLLLLLLRRRRRRRRRRRLLLLLLLLTTTTTTTTTTTTTTPPPPPPPTTTTTTTYYYYYYYYYYYYGGGGDDDDDDDDLLLLLLLLNNNNNNNNHHHHHHHHHHLLLLLLLLVVVVVVVSSSSSSGGGGTTTTTTTMMMMMMMMEEEEEEEEECCCCCCVVVVVVVTTTTTTTTTTTTTTCCCCCCLLLLLLLLRRRRRRRRRRRFFFFFFFFFFFPPPPPPPGGGGQQQQQQQQQLLLLLLLLNNNNNNNNAAAAADDDDDDDDLLLLLLLLRRRRRRRRRRRKKKKKKKKKLLLLLLLLAAAAAVVVVVVVNNNNNNNNMMMMMMMMVVVVVVVPPPPPPPFFFFFFFFFFFPPPPPPPRRRRRRRRRRRLLLLLLLLHHHHHHHHHHFFFFFFFFFFFFFFFFFFFFFFMMMMMMMMPPPPPPPGGGGFFFFFFFFFFFAAAAAPPPPPPPLLLLLLLLTTTTTTTSSSSSSRRRRRRRRRRRGGGGSSSSSSQQQQQQQQQQQQQQQQQQYYYYYYYYYYYYRRRRRRRRRRRAAAAALLLLLLLLTTTTTTTVVVVVVVPPPPPPPDDDDDDDDLLLLLLLLTTTTTTTQQQQQQQQQQQQQQQQQQVVVVVVVFFFFFFFFFFFDDDDDDDDAAAAAKKKKKKKKKNNNNNNNNMMMMMMMMMMMMMMMMAAAAAAAAAACCCCCCDDDDDDDDPPPPPPPRRRRRRRRRRRHHHHHHHHHHGGGGRRRRRRRRRRRYYYYYYYYYYYYLLLLLLLLTTTTTTTVVVVVVVAAAAAAAAAAVVVVVVVFFFFFFFFFFFRRRRRRRRRRRGGGGRRRRRRRRRRRMMMMMMMMSSSSSSMMMMMMMMKKKKKKKKKEEEEEEEEEVVVVVVVDDDDDDDDEEEEEEEEEQQQQQQQQQMMMMMMMMLLLLLLLLNNNNNNNNVVVVVVVQQQQQQQQQNNNNNNNNKKKKKKKKKNNNNNNNNSSSSSSSSSSSSYYYYYYYYYYYYFFFFFFFFFFFVVVVVVVEEEEEEEEEWWWWWWWWWWWWWWIIIIIIIIPPPPPPPNNNNNNNNNNNNNNNNVVVVVVVKKKKKKKKKTTTTTTTAAAAAVVVVVVVCCCCCCDDDDDDDDIIIIIIIIPPPPPPPPPPPPPPRRRRRRRRRRRGGGGLLLLLLLLKKKKKKKKKMMMMMMMMAAAAAVVVVVVVTTTTTTTFFFFFFFFFFFIIIIIIIIGGGGNNNNNNNNSSSSSSTTTTTTTAAAAAIIIIIIIIQQQQQQQQQEEEEEEEEELLLLLLLLFFFFFFFFFFFKKKKKKKKKRRRRRRRRRRRIIIIIIIISSSSSSEEEEEEEEEQQQQQQQQQFFFFFFFFFFFTTTTTTTAAAAAMMMMMMMMFFFFFFFFFFFRRRRRRRRRRRRRRRRRRRRRRKKKKKKKKKAAAAAFFFFFFFFFFFLLLLLLLLHHHHHHHHHHWWWWWWWWWWWWWWYYYYYYYYYYYYTTTTTTTGGGGEEEEEEEEEGGGGMMMMMMMMDDDDDDDDEEEEEEEEEMMMMMMMMEEEEEEEEEFFFFFFFFFFFTTTTTTTEEEEEEEEEAAAAAEEEEEEEEESSSSSSNNNNNNNNMMMMMMMMNNNNNNNNDDDDDDDDLLLLLLLLVVVVVVVSSSSSSEEEEEEEEEYYYYYYYYYYYYQQQQQQQQQQQQQQQQQQYYYYYYYYYYYYQQQQQQQQQDDDDDDDDAAAAATTTTTTTAAAAAEEEEEEEEEEEEEEEEEEEEEEEEEEEEEEEEEEEEDDDDDDDDFFFFFFFFFFFGGGGEEEEEEEEEEEEEEEEEEAAAAAEEEEEEEEEEEEEEEEEEEEEEEEEEEAAAAAA

SEQ ID NO: 122 - protein, 3512 aa, Lupinus albus
MMMMMMMMRRRRRRRRRRREEEEEEEEEIIIIIIIILLLLLLLLHHHHHHHHHHIIIIIIIIQQQQQQQQQGGGGGGGGQQQQQQQQQCCCCCCGGGGNNNNNNNNQQQQQQQQQIIIIIIIIGGGGAAAAAKKKKKKKKKFFFFFFFFFFFWWWWWWWWWWWWWWEEEEEEEEEVVVVVVVVVVVVVVCCCCCCAAAAAEEEEEEEEEHHHHHHHHHHGGGGIIIIIIIIDDDDDDDDSSSSSSTTTTTTTGGGGRRRRRRRRRRRYYYYYYYYYYYYGGGGGGGGDDDDDDDDNNNNNNNNEEEEEEEEELLLLLLLLQQQQQQQQQLLLLLLLLEEEEEEEEERRRRRRRRRRRVVVVVVVNNNNNNNNVVVVVVVYYYYYYYYYYYYYYYYYYYYYYYYNNNNNNNNEEEEEEEEEAAAAASSSSSSCCCCCCGGGGRRRRRRRRRRRFFFFFFFFFFFVVVVVVVPPPPPPPRRRRRRRRRRRAAAAAVVVVVVVLLLLLLLLMMMMMMMMDDDDDDDDLLLLLLLLEEEEEEEEEPPPPPPPGGGGTTTTTTTMMMMMMMMDDDDDDDDSSSSSSVVVVVVVRRRRRRRRRRRSSSSSSGGGGPPPPPPPYYYYYYYYYYYYGGGGQQQQQQQQQIIIIIIIIFFFFFFFFFFFRRRRRRRRRRRPPPPPPPDDDDDDDDNNNNNNNNFFFFFFFFFFFVVVVVVVFFFFFFFFFFFGGGGQQQQQQQQQSSSSSSGGGGAAAAAGGGGNNNNNNNNNNNNNNNNWWWWWWWWWWWWWWAAAAAKKKKKKKKKGGGGHHHHHHHHHHYYYYYYYYYYYYTTTTTTTEEEEEEEEEGGGGAAAAAEEEEEEEEELLLLLLLLIIIIIIIIDDDDDDDDSSSSSSVVVVVVVLLLLLLLLDDDDDDDDVVVVVVVVVVVVVVRRRRRRRRRRRKKKKKKKKKEEEEEEEEEAAAAAEEEEEEEEENNNNNNNNCCCCCCDDDDDDDDCCCCCCLLLLLLLLQQQQQQQQQGGGGFFFFFFFFFFFQQQQQQQQQVVVVVVVCCCCCCHHHHHHHHHHSSSSSSLLLLLLLLGGGGGGGGGGGGTTTTTTTGGGGSSSSSSGGGGMMMMMMMMGGGGTTTTTTTLLLLLLLLLLLLLLLLIIIIIIIISSSSSSKKKKKKKKKIIIIIIIIRRRRRRRRRRREEEEEEEEEEEEEEEEEEYYYYYYYYYYYYPPPPPPPDDDDDDDDRRRRRRRRRRRMMMMMMMMMMMMMMMMLLLLLLLLTTTTTTTFFFFFFFFFFFSSSSSSVVVVVVVFFFFFFFFFFFPPPPPPPSSSSSSPPPPPPPKKKKKKKKKVVVVVVVSSSSSSDDDDDDDDTTTTTTTVVVVVVVVVVVVVVEEEEEEEEEPPPPPPPYYYYYYYYYYYYNNNNNNNNAAAAATTTTTTTLLLLLLLLSSSSSSVVVVVVVHHHHHHHHHHQQQQQQQQQLLLLLLLLVVVVVVVEEEEEEEEENNNNNNNNAAAAADDDDDDDDEEEEEEEEECCCCCCMMMMMMMMVVVVVVVLLLLLLLLDDDDDDDDNNNNNNNNEEEEEEEEEAAAAALLLLLLLLYYYYYYYYYYYYDDDDDDDDIIIIIIIICCCCCCFFFFFFFFFFFRRRRRRRRRRRTTTTTTTLLLLLLLLKKKKKKKKKLLLLLLLLTTTTTTTTTTTTTTPPPPPPPSSSSSSFFFFFFFFFFFGGGGDDDDDDDDLLLLLLLLNNNNNNNNHHHHHHHHHHLLLLLLLLIIIIIIIISSSSSSAAAAATTTTTTTMMMMMMMMSSSSSSGGGGVVVVVVVTTTTTTTCCCCCCCCCCCCLLLLLLLLRRRRRRRRRRRFFFFFFFFFFFPPPPPPPGGGGQQQQQQQQQLLLLLLLLNNNNNNNNSSSSSSDDDDDDDDLLLLLLLLRRRRRRRRRRRKKKKKKKKKLLLLLLLLAAAAAVVVVVVVNNNNNNNNLLLLLLLLIIIIIIIIPPPPPPPFFFFFFFFFFFPPPPPPPRRRRRRRRRRRLLLLLLLLHHHHHHHHHHFFFFFFFFFFFFFFFFFFFFFFMMMMMMMMVVVVVVVGGGGFFFFFFFFFFFAAAAAPPPPPPPLLLLLLLLTTTTTTTSSSSSSRRRRRRRRRRRGGGGSSSSSSQQQQQQQQQQQQQQQQQQYYYYYYYYYYYYRRRRRRRRRRRAAAAALLLLLLLLTTTTTTTVVVVVVVPPPPPPPEEEEEEEEELLLLLLLLTTTTTTTQQQQQQQQQQQQQQQQQQMMMMMMMMWWWWWWWWWWWWWWDDDDDDDDAAAAAKKKKKKKKKNNNNNNNNMMMMMMMMMMMMMMMMCCCCCCAAAAAAAAAADDDDDDDDPPPPPPPRRRRRRRRRRRHHHHHHHHHHGGGGRRRRRRRRRRRYYYYYYYYYYYYLLLLLLLLTTTTTTTAAAAASSSSSSAAAAAMMMMMMMMFFFFFFFFFFFRRRRRRRRRRRGGGGKKKKKKKKKMMMMMMMMSSSSSSTTTTTTTKKKKKKKKKEEEEEEEEEVVVVVVVDDDDDDDDEEEEEEEEEQQQQQQQQQMMMMMMMMIIIIIIIINNNNNNNNVVVVVVVQQQQQQQQQNNNNNNNNKKKKKKKKKNNNNNNNNSSSSSSSSSSSSYYYYYYYYYYYYFFFFFFFFFFFVVVVVVVEEEEEEEEEWWWWWWWWWWWWWWIIIIIIIIPPPPPPPNNNNNNNNNNNNNNNNVVVVVVVKKKKKKKKKSSSSSSTTTTTTTVVVVVVVCCCCCCDDDDDDDDIIIIIIIIPPPPPPPPPPPPPPTTTTTTTGGGGLLLLLLLLKKKKKKKKKMMMMMMMMAAAAASSSSSSTTTTTTTFFFFFFFFFFFIIIIIIIIGGGGNNNNNNNNSSSSSSTTTTTTTSSSSSSIIIIIIIIQQQQQQQQQEEEEEEEEEMMMMMMMMFFFFFFFFFFFRRRRRRRRRRRRRRRRRRRRRRVVVVVVVSSSSSSEEEEEEEEEQQQQQQQQQFFFFFFFFFFFTTTTTTTAAAAAMMMMMMMMFFFFFFFFFFFRRRRRRRRRRRRRRRRRRRRRRKKKKKKKKKAAAAAFFFFFFFFFFFLLLLLLLLHHHHHHHHHHWWWWWWWWWWWWWWYYYYYYYYYYYYTTTTTTTGGGGEEEEEEEEEGGGGMMMMMMMMDDDDDDDDEEEEEEEEEMMMMMMMMEEEEEEEEEFFFFFFFFFFFTTTTTTTEEEEEEEEEAAAAAEEEEEEEEESSSSSSNNNNNNNNMMMMMMMMNNNNNNNNDDDDDDDDLLLLLLLLVVVVVVVSSSSSSEEEEEEEEEYYYYYYYYYYYYQQQQQQQQQQQQQQQQQQYYYYYYYYYYYYQQQQQQQQQDDDDDDDDAAAAATTTTTTTAAAAADDDDDDDDEEEEEEEEEDDDDDDDDGGGGYYYYYYYYYYYYEEEEEEEEEYYYYYYYYYYYYEEEEEEEEEDDDDDDDDEEEEEEEEEEEEEEEEEEEEEEEEEEEIIIIIIIIGGGGEEEEEEEEEEEEEEEEEEAAAAAA

SEQ ID NO: 123 - protein, 3496 aa, Zea mays
MMMMMMMMRRRRRRRRRRREEEEEEEEEIIIIIIIILLLLLLLLHHHHHHHHHHIIIIIIIIQQQQQQQQQGGGGGGGGQQQQQQQQQCCCCCCGGGGNNNNNNNNQQQQQQQQQIIIIIIIIGGGGAAAAAKKKKKKKKKFFFFFFFFFFFWWWWWWWWWWWWWWEEEEEEEEEVVVVVVVVVVVVVVCCCCCCAAAAAEEEEEEEEEHHHHHHHHHHGGGGIIIIIIIIDDDDDDDDAAAAATTTTTTTGGGGRRRRRRRRRRRYYYYYYYYYYYYGGGGGGGGDDDDDDDDSSSSSSDDDDDDDDLLLLLLLLQQQQQQQQQLLLLLLLLEEEEEEEEERRRRRRRRRRRVVVVVVVNNNNNNNNVVVVVVVYYYYYYYYYYYYYYYYYYYYYYYYNNNNNNNNEEEEEEEEEAAAAASSSSSSCCCCCCGGGGRRRRRRRRRRRFFFFFFFFFFFVVVVVVVPPPPPPPRRRRRRRRRRRAAAAAVVVVVVVLLLLLLLLMMMMMMMMDDDDDDDDLLLLLLLLEEEEEEEEEPPPPPPPGGGGTTTTTTTMMMMMMMMDDDDDDDDSSSSSSVVVVVVVRRRRRRRRRRRSSSSSSGGGGPPPPPPPYYYYYYYYYYYYGGGGHHHHHHHHHHIIIIIIIIFFFFFFFFFFFRRRRRRRRRRRPPPPPPPDDDDDDDDNNNNNNNNFFFFFFFFFFFVVVVVVVFFFFFFFFFFFGGGGQQQQQQQQQSSSSSSGGGGAAAAAGGGGNNNNNNNNNNNNNNNNSSSSSSAAAAAKKKKKKKKKGGGGHHHHHHHHHHYYYYYYYYYYYYTTTTTTTEEEEEEEEEGGGGAAAAAEEEEEEEEELLLLLLLLIIIIIIIIDDDDDDDDSSSSSSVVVVVVVLLLLLLLLDDDDDDDDVVVVVVVVVVVVVVRRRRRRRRRRRKKKKKKKKKEEEEEEEEEAAAAAEEEEEEEEENNNNNNNNCCCCCCDDDDDDDDCCCCCCLLLLLLLLQQQQQQQQQGGGGFFFFFFFFFFFQQQQQQQQQVVVVVVVCCCCCCHHHHHHHHHHSSSSSSLLLLLLLLGGGGGGGGGGGGTTTTTTTGGGGSSSSSSAAAAAMMMMMMMMGGGGTTTTTTTLLLLLLLLLLLLLLLLIIIIIIIISSSSSSKKKKKKKKKIIIIIIIIRRRRRRRRRRREEEEEEEEEEEEEEEEEEYYYYYYYYYYYYPPPPPPPDDDDDDDDRRRRRRRRRRRMMMMMMMMMMMMMMMMLLLLLLLLTTTTTTTFFFFFFFFFFFSSSSSSVVVVVVVFFFFFFFFFFFPPPPPPPSSSSSSPPPPPPPKKKKKKKKKVVVVVVVSSSSSSDDDDDDDDTTTTTTTVVVVVVVVVVVVVVEEEEEEEEEPPPPPPPYYYYYYYYYYYYNNNNNNNNAAAAATTTTTTTLLLLLLLLSSSSSSVVVVVVVHHHHHHHHHHQQQQQQQQQLLLLLLLLVVVVVVVEEEEEEEEENNNNNNNNAAAAADDDDDDDDEEEEEEEEECCCCCCMMMMMMMMVVVVVVVLLLLLLLLDDDDDDDDNNNNNNNNEEEEEEEEEAAAAALLLLLLLLYYYYYYYYYYYYDDDDDDDDIIIIIIIICCCCCCFFFFFFFFFFFRRRRRRRRRRRTTTTTTTLLLLLLLLKKKKKKKKKLLLLLLLLTTTTTTTTTTTTTTPPPPPPPSSSSSSFFFFFFFFFFFGGGGDDDDDDDDLLLLLLLLNNNNNNNNHHHHHHHHHHLLLLLLLLIIIIIIIISSSSSSAAAAATTTTTTTMMMMMMMMSSSSSSGGGGVVVVVVVTTTTTTTCCCCCCCCCCCCLLLLLLLLRRRRRRRRRRRFFFFFFFFFFFPPPPPPPGGGGQQQQQQQQQLLLLLLLLNNNNNNNNSSSSSSDDDDDDDDLLLLLLLLRRRRRRRRRRRKKKKKKKKKLLLLLLLLAAAAAVVVVVVVNNNNNNNNLLLLLLLLIIIIIIIIPPPPPPPFFFFFFFFFFFPPPPPPPRRRRRRRRRRRLLLLLLLLHHHHHHHHHHFFFFFFFFFFFFFFFFFFFFFFMMMMMMMMVVVVVVVGGGGFFFFFFFFFFFAAAAAPPPPPPPLLLLLLLLTTTTTTTSSSSSSRRRRRRRRRRRGGGGSSSSSSQQQQQQQQQQQQQQQQQQYYYYYYYYYYYYRRRRRRRRRRRAAAAALLLLLLLLTTTTTTTVVVVVVVPPPPPPPEEEEEEEEELLLLLLLLTTTTTTTQQQQQQQQQQQQQQQQQQMMMMMMMMWWWWWWWWWWWWWWDDDDDDDDAAAAAKKKKKKKKKNNNNNNNNMMMMMMMMMMMMMMMMCCCCCCAAAAAAAAAADDDDDDDDPPPPPPPRRRRRRRRRRRHHHHHHHHHHGGGGRRRRRRRRRRRYYYYYYYYYYYYLLLLLLLLTTTTTTTAAAAASSSSSSAAAAAMMMMMMMMFFFFFFFFFFFRRRRRRRRRRRGGGGKKKKKKKKKMMMMMMMMSSSSSSTTTTTTTKKKKKKKKKEEEEEEEEEVVVVVVVDDDDDDDDEEEEEEEEEQQQQQQQQQMMMMMMMMLLLLLLLLNNNNNNNNVVVVVVVQQQQQQQQQNNNNNNNNKKKKKKKKKNNNNNNNNSSSSSSSSSSSSYYYYYYYYYYYYFFFFFFFFFFFVVVVVVVEEEEEEEEEWWWWWWWWWWWWWWIIIIIIIIPPPPPPPNNNNNNNNNNNNNNNNVVVVVVVKKKKKKKKKSSSSSSTTTTTTTVVVVVVVCCCCCCDDDDDDDDIIIIIIIIPPPPPPPPPPPPPPHHHHHHHHHHGGGGLLLLLLLLKKKKKKKKKMMMMMMMMAAAAASSSSSSTTTTTTTFFFFFFFFFFFIIIIIIIIGGGGNNNNNNNNSSSSSSTTTTTTTSSSSSSIIIIIIIIQQQQQQQQQEEEEEEEEEMMMMMMMMFFFFFFFFFFFRRRRRRRRRRRRRRRRRRRRRRVVVVVVVSSSSSSEEEEEEEEEQQQQQQQQQFFFFFFFFFFFTTTTTTTAAAAAMMMMMMMMFFFFFFFFFFFRRRRRRRRRRRRRRRRRRRRRRKKKKKKKKKAAAAAFFFFFFFFFFFLLLLLLLLHHHHHHHHHHWWWWWWWWWWWWWWYYYYYYYYYYYYTTTTTTTGGGGEEEEEEEEEGGGGMMMMMMMMDDDDDDDDEEEEEEEEEMMMMMMMMEEEEEEEEEFFFFFFFFFFFTTTTTTTEEEEEEEEEAAAAAEEEEEEEEESSSSSSNNNNNNNNMMMMMMMMNNNNNNNNDDDDDDDDLLLLLLLLVVVVVVVSSSSSSEEEEEEEEEYYYYYYYYYYYYQQQQQQQQQQQQQQQQQQYYYYYYYYYYYYQQQQQQQQQDDDDDDDDAAAAATTTTTTTAAAAADDDDDDDDEEEEEEEEEEEEEEEEEEGGGGEEEEEEEEEYYYYYYYYYYYYEEEEEEEEEDDDDDDDDEEEEEEEEEEEEEEEEEEEEEEEEEEEGGGGDDDDDDDDLLLLLLLLQQQQQQQQQDDDDDDDDD

SEQ ID NO: 124 - protein, 3524 aa, Manduca sexta
MMMMMMMMRRRRRRRRRRREEEEEEEEEIIIIIIIIVVVVVVVHHHHHHHHHHIIIIIIIIQQQQQQQQQAAAAAGGGGQQQQQQQQQCCCCCCGGGGNNNNNNNNQQQQQQQQQIIIIIIIIGGGGAAAAAKKKKKKKKKFFFFFFFFFFFWWWWWWWWWWWWWWEEEEEEEEEIIIIIIIIIIIIIIIISSSSSSDDDDDDDDEEEEEEEEEHHHHHHHHHHGGGGIIIIIIIIDDDDDDDDPPPPPPPTTTTTTTGGGGAAAAAYYYYYYYYYYYYHHHHHHHHHHGGGGDDDDDDDDSSSSSSDDDDDDDDLLLLLLLLQQQQQQQQQLLLLLLLLEEEEEEEEERRRRRRRRRRRIIIIIIIINNNNNNNNVVVVVVVYYYYYYYYYYYYYYYYYYYYYYYYNNNNNNNNEEEEEEEEEAAAAASSSSSSGGGGGGGGKKKKKKKKKYYYYYYYYYYYYVVVVVVVPPPPPPPRRRRRRRRRRRAAAAAIIIIIIIILLLLLLLLVVVVVVVDDDDDDDDLLLLLLLLEEEEEEEEEPPPPPPPGGGGTTTTTTTMMMMMMMMDDDDDDDDSSSSSSVVVVVVVRRRRRRRRRRRSSSSSSGGGGPPPPPPPFFFFFFFFFFFGGGGQQQQQQQQQIIIIIIIIFFFFFFFFFFFRRRRRRRRRRRPPPPPPPDDDDDDDDNNNNNNNNFFFFFFFFFFFVVVVVVVFFFFFFFFFFFGGGGQQQQQQQQQSSSSSSGGGGAAAAAGGGGNNNNNNNNNNNNNNNNWWWWWWWWWWWWWWAAAAAKKKKKKKKKGGGGHHHHHHHHHHYYYYYYYYYYYYTTTTTTTEEEEEEEEEGGGGAAAAAEEEEEEEEELLLLLLLLVVVVVVVDDDDDDDDSSSSSSVVVVVVVLLLLLLLLDDDDDDDDVVVVVVVVVVVVVVRRRRRRRRRRRKKKKKKKKKEEEEEEEEEAAAAAEEEEEEEEESSSSSSCCCCCCDDDDDDDDCCCCCCLLLLLLLLQQQQQQQQQGGGGFFFFFFFFFFFQQQQQQQQQLLLLLLLLTTTTTTTHHHHHHHHHHSSSSSSLLLLLLLLGGGGGGGGGGGGTTTTTTTGGGGSSSSSSGGGGMMMMMMMMGGGGTTTTTTTLLLLLLLLLLLLLLLLIIIIIIIISSSSSSKKKKKKKKKIIIIIIIIRRRRRRRRRRREEEEEEEEEEEEEEEEEEYYYYYYYYYYYYPPPPPPPDDDDDDDDRRRRRRRRRRRIIIIIIIIMMMMMMMMNNNNNNNNTTTTTTTYYYYYYYYYYYYSSSSSSVVVVVVVVVVVVVVPPPPPPPSSSSSSPPPPPPPKKKKKKKKKVVVVVVVSSSSSSDDDDDDDDTTTTTTTVVVVVVVVVVVVVVEEEEEEEEEPPPPPPPYYYYYYYYYYYYNNNNNNNNAAAAATTTTTTTLLLLLLLLSSSSSSVVVVVVVHHHHHHHHHHQQQQQQQQQLLLLLLLLVVVVVVVEEEEEEEEENNNNNNNNTTTTTTTDDDDDDDDEEEEEEEEETTTTTTTYYYYYYYYYYYYCCCCCCIIIIIIIIDDDDDDDDNNNNNNNNEEEEEEEEEAAAAALLLLLLLLYYYYYYYYYYYYDDDDDDDDIIIIIIIICCCCCCFFFFFFFFFFFRRRRRRRRRRRTTTTTTTLLLLLLLLKKKKKKKKKLLLLLLLLSSSSSSTTTTTTTPPPPPPPTTTTTTTYYYYYYYYYYYYGGGGDDDDDDDDLLLLLLLLNNNNNNNNHHHHHHHHHHLLLLLLLLVVVVVVVSSSSSSLLLLLLLLTTTTTTTMMMMMMMMSSSSSSGGGGVVVVVVVTTTTTTTTTTTTTTCCCCCCLLLLLLLLRRRRRRRRRRRFFFFFFFFFFFPPPPPPPGGGGQQQQQQQQQLLLLLLLLNNNNNNNNAAAAADDDDDDDDLLLLLLLLRRRRRRRRRRRKKKKKKKKKLLLLLLLLAAAAAVVVVVVVNNNNNNNNMMMMMMMMVVVVVVVPPPPPPPFFFFFFFFFFFPPPPPPPRRRRRRRRRRRLLLLLLLLHHHHHHHHHHFFFFFFFFFFFFFFFFFFFFFFMMMMMMMMPPPPPPPGGGGFFFFFFFFFFFAAAAAPPPPPPPLLLLLLLLTTTTTTTSSSSSSRRRRRRRRRRRGGGGSSSSSSQQQQQQQQQQQQQQQQQQYYYYYYYYYYYYRRRRRRRRRRRAAAAALLLLLLLLTTTTTTTVVVVVVVPPPPPPPEEEEEEEEELLLLLLLLTTTTTTTQQQQQQQQQQQQQQQQQQMMMMMMMMFFFFFFFFFFFDDDDDDDDAAAAAKKKKKKKKKNNNNNNNNMMMMMMMMMMMMMMMMAAAAAAAAAACCCCCCDDDDDDDDPPPPPPPRRRRRRRRRRRHHHHHHHHHHGGGGRRRRRRRRRRRYYYYYYYYYYYYLLLLLLLLTTTTTTTVVVVVVVAAAAAAAAAAIIIIIIIIFFFFFFFFFFFRRRRRRRRRRRGGGGRRRRRRRRRRRMMMMMMMMSSSSSSMMMMMMMMKKKKKKKKKEEEEEEEEEVVVVVVVDDDDDDDDEEEEEEEEEQQQQQQQQQMMMMMMMMLLLLLLLLNNNNNNNNIIIIIIIIQQQQQQQQQNNNNNNNNKKKKKKKKKNNNNNNNNSSSSSSSSSSSSYYYYYYYYYYYYFFFFFFFFFFFVVVVVVVEEEEEEEEEWWWWWWWWWWWWWWIIIIIIIIPPPPPPPNNNNNNNNNNNNNNNNVVVVVVVKKKKKKKKKTTTTTTTAAAAAVVVVVVVCCCCCCDDDDDDDDIIIIIIIIPPPPPPPPPPPPPPRRRRRRRRRRRGGGGLLLLLLLLKKKKKKKKKMMMMMMMMSSSSSSAAAAATTTTTTTFFFFFFFFFFFIIIIIIIIGGGGNNNNNNNNSSSSSSTTTTTTTAAAAAIIIIIIIIQQQQQQQQQEEEEEEEEELLLLLLLLFFFFFFFFFFFKKKKKKKKKRRRRRRRRRRRIIIIIIIISSSSSSEEEEEEEEEQQQQQQQQQFFFFFFFFFFFTTTTTTTAAAAAMMMMMMMMFFFFFFFFFFFRRRRRRRRRRRRRRRRRRRRRRKKKKKKKKKAAAAAFFFFFFFFFFFLLLLLLLLHHHHHHHHHHWWWWWWWWWWWWWWYYYYYYYYYYYYTTTTTTTGGGGEEEEEEEEEGGGGMMMMMMMMDDDDDDDDEEEEEEEEEMMMMMMMMEEEEEEEEEFFFFFFFFFFFTTTTTTTEEEEEEEEEAAAAAEEEEEEEEESSSSSSNNNNNNNNMMMMMMMMNNNNNNNNDDDDDDDDLLLLLLLLVVVVVVVSSSSSSEEEEEEEEEYYYYYYYYYYYYQQQQQQQQQQQQQQQQQQYYYYYYYYYYYYQQQQQQQQQEEEEEEEEEAAAAATTTTTTTAAAAADDDDDDDDEEEEEEEEEDDDDDDDDAAAAAEEEEEEEEEFFFFFFFFFFFDDDDDDDDEEEEEEEEEEEEEEEEEEQQQQQQQQQEEEEEEEEEQQQQQQQQQEEEEEEEEEIIIIIIIIEEEEEEEEEDDDDDDDDNNNNNNNNN

SEQ ID NO: 125 - protein, 3496 aa, Notothenia coriiceps
MMMMMMMMRRRRRRRRRRREEEEEEEEEIIIIIIIIVVVVVVVHHHHHHHHHHLLLLLLLLQQQQQQQQQAAAAAGGGGQQQQQQQQQCCCCCCGGGGNNNNNNNNQQQQQQQQQIIIIIIIIGGGGSSSSSSKKKKKKKKKFFFFFFFFFFFWWWWWWWWWWWWWWEEEEEEEEEVVVVVVVIIIIIIIISSSSSSDDDDDDDDEEEEEEEEEHHHHHHHHHHGGGGIIIIIIIIDDDDDDDDPPPPPPPTTTTTTTGGGGSSSSSSYYYYYYYYYYYYHHHHHHHHHHGGGGDDDDDDDDSSSSSSDDDDDDDDLLLLLLLLQQQQQQQQQLLLLLLLLDDDDDDDDRRRRRRRRRRRIIIIIIIINNNNNNNNVVVVVVVYYYYYYYYYYYYYYYYYYYYYYYYNNNNNNNNEEEEEEEEEAAAAASSSSSSGGGGGGGGKKKKKKKKKYYYYYYYYYYYYVVVVVVVPPPPPPPRRRRRRRRRRRAAAAAVVVVVVVLLLLLLLLVVVVVVVDDDDDDDDLLLLLLLLEEEEEEEEEPPPPPPPGGGGTTTTTTTMMMMMMMMDDDDDDDDSSSSSSVVVVVVVRRRRRRRRRRRSSSSSSGGGGPPPPPPPFFFFFFFFFFFGGGGQQQQQQQQQIIIIIIIIFFFFFFFFFFFRRRRRRRRRRRPPPPPPPDDDDDDDDNNNNNNNNFFFFFFFFFFFVVVVVVVFFFFFFFFFFFGGGGQQQQQQQQQSSSSSSGGGGAAAAAGGGGNNNNNNNNNNNNNNNNWWWWWWWWWWWWWWAAAAAKKKKKKKKKGGGGHHHHHHHHHHYYYYYYYYYYYYTTTTTTTEEEEEEEEEGGGGAAAAAEEEEEEEEELLLLLLLLVVVVVVVDDDDDDDDSSSSSSVVVVVVVLLLLLLLLDDDDDDDDVVVVVVVVVVVVVVRRRRRRRRRRRKKKKKKKKKEEEEEEEEEAAAAAEEEEEEEEEGGGGCCCCCCDDDDDDDDCCCCCCLLLLLLLLQQQQQQQQQGGGGFFFFFFFFFFFQQQQQQQQQLLLLLLLLTTTTTTTHHHHHHHHHHSSSSSSLLLLLLLLGGGGGGGGGGGGTTTTTTTGGGGSSSSSSGGGGMMMMMMMMGGGGTTTTTTTLLLLLLLLLLLLLLLLIIIIIIIISSSSSSKKKKKKKKKIIIIIIIIRRRRRRRRRRREEEEEEEEEEEEEEEEEEYYYYYYYYYYYYPPPPPPPDDDDDDDDRRRRRRRRRRRIIIIIIIIMMMMMMMMNNNNNNNNTTTTTTTFFFFFFFFFFFSSSSSSVVVVVVVVVVVVVVPPPPPPPSSSSSSPPPPPPPKKKKKKKKKVVVVVVVSSSSSSDDDDDDDDTTTTTTTVVVVVVVVVVVVVVEEEEEEEEEPPPPPPPYYYYYYYYYYYYNNNNNNNNAAAAATTTTTTTLLLLLLLLSSSSSSVVVVVVVHHHHHHHHHHQQQQQQQQQLLLLLLLLVVVVVVVEEEEEEEEENNNNNNNNTTTTTTTDDDDDDDDEEEEEEEEETTTTTTTFFFFFFFFFFFCCCCCCIIIIIIIIDDDDDDDDNNNNNNNNEEEEEEEEEAAAAALLLLLLLLYYYYYYYYYYYYDDDDDDDDIIIIIIIICCCCCCFFFFFFFFFFFRRRRRRRRRRRTTTTTTTLLLLLLLLKKKKKKKKKLLLLLLLLTTTTTTTTTTTTTTPPPPPPPTTTTTTTYYYYYYYYYYYYGGGGDDDDDDDDLLLLLLLLNNNNNNNNHHHHHHHHHHLLLLLLLLVVVVVVVSSSSSSAAAAATTTTTTTMMMMMMMMSSSSSSGGGGVVVVVVVTTTTTTTTTTTTTTCCCCCCLLLLLLLLRRRRRRRRRRRFFFFFFFFFFFPPPPPPPGGGGQQQQQQQQQLLLLLLLLNNNNNNNNAAAAADDDDDDDDLLLLLLLLRRRRRRRRRRRKKKKKKKKKLLLLLLLLAAAAAVVVVVVVNNNNNNNNMMMMMMMMVVVVVVVPPPPPPPFFFFFFFFFFFPPPPPPPRRRRRRRRRRRLLLLLLLLHHHHHHHHHHFFFFFFFFFFFFFFFFFFFFFFIIIIIIIIPPPPPPPGGGGFFFFFFFFFFFAAAAAPPPPPPPLLLLLLLLTTTTTTTSSSSSSRRRRRRRRRRRGGGGGGGGQQQQQQQQQQQQQQQQQQYYYYYYYYYYYYRRRRRRRRRRRSSSSSSLLLLLLLLTTTTTTTVVVVVVVPPPPPPPEEEEEEEEELLLLLLLLTTTTTTTQQQQQQQQQQQQQQQQQQMMMMMMMMFFFFFFFFFFFDDDDDDDDSSSSSSKKKKKKKKKNNNNNNNNMMMMMMMMMMMMMMMMAAAAAAAAAACCCCCCDDDDDDDDPPPPPPPRRRRRRRRRRRHHHHHHHHHHGGGGRRRRRRRRRRRYYYYYYYYYYYYLLLLLLLLTTTTTTTVVVVVVVAAAAAAAAAAIIIIIIIIFFFFFFFFFFFRRRRRRRRRRRGGGGRRRRRRRRRRRMMMMMMMMSSSSSSMMMMMMMMKKKKKKKKKEEEEEEEEEVVVVVVVDDDDDDDDEEEEEEEEEQQQQQQQQQMMMMMMMMLLLLLLLLNNNNNNNNAAAAAQQQQQQQQQNNNNNNNNKKKKKKKKKNNNNNNNNSSSSSSSSSSSSYYYYYYYYYYYYFFFFFFFFFFFVVVVVVVEEEEEEEEEWWWWWWWWWWWWWWIIIIIIIIPPPPPPPNNNNNNNNNNNNNNNNVVVVVVVKKKKKKKKKTTTTTTTAAAAAVVVVVVVCCCCCCDDDDDDDDIIIIIIIIPPPPPPPPPPPPPPRRRRRRRRRRRGGGGLLLLLLLLKKKKKKKKKMMMMMMMMAAAAAAAAAATTTTTTTFFFFFFFFFFFIIIIIIIIGGGGNNNNNNNNSSSSSSTTTTTTTAAAAAIIIIIIIIQQQQQQQQQEEEEEEEEELLLLLLLLFFFFFFFFFFFKKKKKKKKKRRRRRRRRRRRIIIIIIIISSSSSSEEEEEEEEEQQQQQQQQQFFFFFFFFFFFTTTTTTTAAAAAMMMMMMMMFFFFFFFFFFFRRRRRRRRRRRRRRRRRRRRRRKKKKKKKKKAAAAAFFFFFFFFFFFLLLLLLLLHHHHHHHHHHWWWWWWWWWWWWWWYYYYYYYYYYYYTTTTTTTGGGGEEEEEEEEEGGGGMMMMMMMMDDDDDDDDEEEEEEEEEMMMMMMMMEEEEEEEEEFFFFFFFFFFFTTTTTTTEEEEEEEEEAAAAAEEEEEEEEESSSSSSNNNNNNNNMMMMMMMMNNNNNNNNDDDDDDDDLLLLLLLLVVVVVVVSSSSSSEEEEEEEEEYYYYYYYYYYYYQQQQQQQQQQQQQQQQQQYYYYYYYYYYYYQQQQQQQQQDDDDDDDDAAAAATTTTTTTAAAAAEEEEEEEEEEEEEEEEEEEEEEEEEEEGGGGEEEEEEEEEFFFFFFFFFFFEEEEEEEEEEEEEEEEEEEEEEEEEEEGGGGEEEEEEEEEYYYYYYYYYYYYEEEEEEEEEDDDDDDDDGGGGAAAAAA

SEQ ID NO: 126 - protein, 3490 aa, Oryza sativa
MMMMMMMMRRRRRRRRRRREEEEEEEEEIIIIIIIILLLLLLLLHHHHHHHHHHIIIIIIIIQQQQQQQQQGGGGGGGGQQQQQQQQQCCCCCCGGGGNNNNNNNNQQQQQQQQQIIIIIIIIGGGGAAAAAKKKKKKKKKFFFFFFFFFFFWWWWWWWWWWWWWWEEEEEEEEEVVVVVVVIIIIIIIICCCCCCDDDDDDDDEEEEEEEEEHHHHHHHHHHGGGGVVVVVVVDDDDDDDDAAAAATTTTTTTGGGGRRRRRRRRRRRYYYYYYYYYYYYAAAAAGGGGDDDDDDDDSSSSSSDDDDDDDDLLLLLLLLQQQQQQQQQLLLLLLLLEEEEEEEEERRRRRRRRRRRIIIIIIIINNNNNNNNVVVVVVVYYYYYYYYYYYYYYYYYYYYYYYYNNNNNNNNEEEEEEEEEAAAAASSSSSSGGGGGGGGRRRRRRRRRRRYYYYYYYYYYYYVVVVVVVPPPPPPPRRRRRRRRRRRTTTTTTTVVVVVVVLLLLLLLLMMMMMMMMDDDDDDDDLLLLLLLLEEEEEEEEEPPPPPPPGGGGTTTTTTTMMMMMMMMDDDDDDDDSSSSSSVVVVVVVRRRRRRRRRRRSSSSSSGGGGPPPPPPPFFFFFFFFFFFGGGGQQQQQQQQQIIIIIIIIFFFFFFFFFFFRRRRRRRRRRRPPPPPPPDDDDDDDDNNNNNNNNFFFFFFFFFFFVVVVVVVFFFFFFFFFFFGGGGQQQQQQQQQSSSSSSGGGGAAAAAGGGGNNNNNNNNNNNNNNNNWWWWWWWWWWWWWWAAAAAKKKKKKKKKGGGGHHHHHHHHHHYYYYYYYYYYYYTTTTTTTEEEEEEEEEGGGGAAAAAEEEEEEEEELLLLLLLLIIIIIIIIDDDDDDDDSSSSSSVVVVVVVLLLLLLLLDDDDDDDDVVVVVVVVVVVVVVRRRRRRRRRRRKKKKKKKKKEEEEEEEEEAAAAAEEEEEEEEENNNNNNNNCCCCCCDDDDDDDDCCCCCCLLLLLLLLQQQQQQQQQGGGGFFFFFFFFFFFQQQQQQQQQVVVVVVVCCCCCCHHHHHHHHHHSSSSSSLLLLLLLLGGGGGGGGGGGGTTTTTTTGGGGSSSSSSGGGGMMMMMMMMGGGGTTTTTTTLLLLLLLLLLLLLLLLIIIIIIIISSSSSSKKKKKKKKKIIIIIIIIRRRRRRRRRRREEEEEEEEEEEEEEEEEEYYYYYYYYYYYYPPPPPPPDDDDDDDDRRRRRRRRRRRMMMMMMMMMMMMMMMMLLLLLLLLTTTTTTTFFFFFFFFFFFSSSSSSVVVVVVVFFFFFFFFFFFPPPPPPPSSSSSSPPPPPPPKKKKKKKKKVVVVVVVSSSSSSDDDDDDDDTTTTTTTVVVVVVVVVVVVVVEEEEEEEEEPPPPPPPYYYYYYYYYYYYNNNNNNNNAAAAATTTTTTTLLLLLLLLSSSSSSVVVVVVVHHHHHHHHHHQQQQQQQQQLLLLLLLLVVVVVVVEEEEEEEEENNNNNNNNAAAAADDDDDDDDEEEEEEEEECCCCCCMMMMMMMMVVVVVVVLLLLLLLLDDDDDDDDNNNNNNNNEEEEEEEEEAAAAALLLLLLLLYYYYYYYYYYYYDDDDDDDDIIIIIIIICCCCCCFFFFFFFFFFFRRRRRRRRRRRTTTTTTTLLLLLLLLKKKKKKKKKLLLLLLLLAAAAATTTTTTTPPPPPPPTTTTTTTFFFFFFFFFFFGGGGDDDDDDDDLLLLLLLLNNNNNNNNHHHHHHHHHHLLLLLLLLIIIIIIIISSSSSSAAAAATTTTTTTMMMMMMMMSSSSSSGGGGVVVVVVVTTTTTTTCCCCCCCCCCCCLLLLLLLLRRRRRRRRRRRFFFFFFFFFFFPPPPPPPGGGGQQQQQQQQQLLLLLLLLNNNNNNNNSSSSSSDDDDDDDDLLLLLLLLRRRRRRRRRRRKKKKKKKKKLLLLLLLLAAAAAVVVVVVVNNNNNNNNLLLLLLLLIIIIIIIIPPPPPPPFFFFFFFFFFFPPPPPPPRRRRRRRRRRRLLLLLLLLHHHHHHHHHHFFFFFFFFFFFFFFFFFFFFFFMMMMMMMMVVVVVVVGGGGFFFFFFFFFFFAAAAAPPPPPPPLLLLLLLLTTTTTTTSSSSSSRRRRRRRRRRRGGGGSSSSSSQQQQQQQQQQQQQQQQQQYYYYYYYYYYYYRRRRRRRRRRRAAAAALLLLLLLLTTTTTTTVVVVVVVPPPPPPPEEEEEEEEELLLLLLLLTTTTTTTQQQQQQQQQQQQQQQQQQMMMMMMMMWWWWWWWWWWWWWWDDDDDDDDAAAAAKKKKKKKKKNNNNNNNNMMMMMMMMMMMMMMMMCCCCCCAAAAAAAAAADDDDDDDDPPPPPPPRRRRRRRRRRRHHHHHHHHHHGGGGRRRRRRRRRRRYYYYYYYYYYYYLLLLLLLLTTTTTTTAAAAASSSSSSAAAAAMMMMMMMMFFFFFFFFFFFRRRRRRRRRRRGGGGKKKKKKKKKMMMMMMMMSSSSSSTTTTTTTKKKKKKKKKEEEEEEEEEVVVVVVVDDDDDDDDEEEEEEEEEQQQQQQQQQMMMMMMMMLLLLLLLLNNNNNNNNVVVVVVVQQQQQQQQQNNNNNNNNKKKKKKKKKNNNNNNNNSSSSSSSSSSSSYYYYYYYYYYYYFFFFFFFFFFFVVVVVVVEEEEEEEEEWWWWWWWWWWWWWWIIIIIIIIPPPPPPPNNNNNNNNNNNNNNNNVVVVVVVKKKKKKKKKSSSSSSSSSSSSVVVVVVVCCCCCCDDDDDDDDIIIIIIIIPPPPPPPPPPPPPPRRRRRRRRRRRGGGGLLLLLLLLKKKKKKKKKMMMMMMMMAAAAAAAAAATTTTTTTFFFFFFFFFFFVVVVVVVGGGGNNNNNNNNSSSSSSTTTTTTTSSSSSSIIIIIIIIQQQQQQQQQEEEEEEEEEMMMMMMMMFFFFFFFFFFFRRRRRRRRRRRRRRRRRRRRRRVVVVVVVSSSSSSEEEEEEEEEQQQQQQQQQFFFFFFFFFFFTTTTTTTAAAAAMMMMMMMMFFFFFFFFFFFRRRRRRRRRRRRRRRRRRRRRRKKKKKKKKKAAAAAFFFFFFFFFFFLLLLLLLLHHHHHHHHHHWWWWWWWWWWWWWWYYYYYYYYYYYYTTTTTTTGGGGEEEEEEEEEGGGGMMMMMMMMDDDDDDDDEEEEEEEEEMMMMMMMMEEEEEEEEEFFFFFFFFFFFTTTTTTTEEEEEEEEEAAAAAEEEEEEEEESSSSSSNNNNNNNNMMMMMMMMNNNNNNNNDDDDDDDDLLLLLLLLVVVVVVVAAAAAEEEEEEEEEYYYYYYYYYYYYQQQQQQQQQQQQQQQQQQYYYYYYYYYYYYQQQQQQQQQDDDDDDDDAAAAATTTTTTTAAAAADDDDDDDDEEEEEEEEEEEEEEEEEEYYYYYYYYYYYYEEEEEEEEEDDDDDDDDEEEEEEEEEEEEEEEEEEEEEEEEEEEEEEEEEEEEAAAAAEEEEEEEEEAAAAAEEEEEEEEEE

SEQ ID NO: 127 - protein, 3467 aa, Paramecium tetraurelia
MMMMMMMMRRRRRRRRRRREEEEEEEEEIIIIIIIIVVVVVVVHHHHHHHHHHIIIIIIIIQQQQQQQQQGGGGGGGGQQQQQQQQQCCCCCCGGGGNNNNNNNNQQQQQQQQQIIIIIIIIGGGGAAAAAKKKKKKKKKFFFFFFFFFFFWWWWWWWWWWWWWWEEEEEEEEEVVVVVVVIIIIIIIISSSSSSDDDDDDDDEEEEEEEEEHHHHHHHHHHGGGGIIIIIIIIDDDDDDDDPPPPPPPTTTTTTTGGGGTTTTTTTYYYYYYYYYYYYHHHHHHHHHHGGGGDDDDDDDDSSSSSSDDDDDDDDLLLLLLLLQQQQQQQQQLLLLLLLLEEEEEEEEERRRRRRRRRRRIIIIIIIINNNNNNNNVVVVVVVYYYYYYYYYYYYYYYYYYYYYYYYNNNNNNNNEEEEEEEEEAAAAATTTTTTTGGGGGGGGRRRRRRRRRRRYYYYYYYYYYYYVVVVVVVPPPPPPPRRRRRRRRRRRAAAAAIIIIIIIILLLLLLLLMMMMMMMMDDDDDDDDLLLLLLLLEEEEEEEEEPPPPPPPGGGGTTTTTTTMMMMMMMMDDDDDDDDSSSSSSVVVVVVVRRRRRRRRRRRAAAAAGGGGPPPPPPPFFFFFFFFFFFGGGGQQQQQQQQQLLLLLLLLFFFFFFFFFFFRRRRRRRRRRRPPPPPPPDDDDDDDDNNNNNNNNFFFFFFFFFFFVVVVVVVFFFFFFFFFFFGGGGQQQQQQQQQTTTTTTTGGGGAAAAAGGGGNNNNNNNNNNNNNNNNWWWWWWWWWWWWWWAAAAAKKKKKKKKKGGGGHHHHHHHHHHYYYYYYYYYYYYTTTTTTTEEEEEEEEEGGGGAAAAAEEEEEEEEELLLLLLLLIIIIIIIIDDDDDDDDSSSSSSVVVVVVVLLLLLLLLDDDDDDDDVVVVVVVVVVVVVVRRRRRRRRRRRKKKKKKKKKEEEEEEEEEAAAAAEEEEEEEEEGGGGCCCCCCDDDDDDDDCCCCCCLLLLLLLLQQQQQQQQQGGGGFFFFFFFFFFFQQQQQQQQQIIIIIIIITTTTTTTHHHHHHHHHHSSSSSSLLLLLLLLGGGGGGGGGGGGTTTTTTTGGGGSSSSSSGGGGMMMMMMMMGGGGTTTTTTTLLLLLLLLLLLLLLLLIIIIIIIISSSSSSKKKKKKKKKVVVVVVVRRRRRRRRRRREEEEEEEEEEEEEEEEEEYYYYYYYYYYYYPPPPPPPDDDDDDDDRRRRRRRRRRRIIIIIIIIMMMMMMMMEEEEEEEEETTTTTTTFFFFFFFFFFFSSSSSSVVVVVVVVVVVVVVPPPPPPPSSSSSSPPPPPPPKKKKKKKKKVVVVVVVSSSSSSDDDDDDDDTTTTTTTVVVVVVVVVVVVVVEEEEEEEEEPPPPPPPYYYYYYYYYYYYNNNNNNNNAAAAATTTTTTTLLLLLLLLSSSSSSVVVVVVVHHHHHHHHHHQQQQQQQQQLLLLLLLLVVVVVVVEEEEEEEEENNNNNNNNAAAAADDDDDDDDEEEEEEEEECCCCCCMMMMMMMMVVVVVVVIIIIIIIIDDDDDDDDNNNNNNNNEEEEEEEEEAAAAALLLLLLLLYYYYYYYYYYYYDDDDDDDDIIIIIIIICCCCCCFFFFFFFFFFFRRRRRRRRRRRTTTTTTTLLLLLLLLKKKKKKKKKLLLLLLLLTTTTTTTTTTTTTTPPPPPPPTTTTTTTYYYYYYYYYYYYGGGGDDDDDDDDLLLLLLLLNNNNNNNNHHHHHHHHHHLLLLLLLLVVVVVVVSSSSSSAAAAAAAAAAMMMMMMMMSSSSSSGGGGVVVVVVVTTTTTTTCCCCCCCCCCCCLLLLLLLLRRRRRRRRRRRFFFFFFFFFFFPPPPPPPGGGGQQQQQQQQQLLLLLLLLNNNNNNNNSSSSSSDDDDDDDDLLLLLLLLRRRRRRRRRRRKKKKKKKKKLLLLLLLLAAAAAVVVVVVVNNNNNNNNLLLLLLLLIIIIIIIIPPPPPPPFFFFFFFFFFFPPPPPPPRRRRRRRRRRRLLLLLLLLHHHHHHHHHHFFFFFFFFFFFFFFFFFFFFFFMMMMMMMMIIIIIIIIGGGGFFFFFFFFFFFAAAAAPPPPPPPLLLLLLLLTTTTTTTSSSSSSRRRRRRRRRRRGGGGSSSSSSQQQQQQQQQQQQQQQQQQYYYYYYYYYYYYRRRRRRRRRRRAAAAALLLLLLLLTTTTTTTVVVVVVVPPPPPPPEEEEEEEEELLLLLLLLTTTTTTTQQQQQQQQQQQQQQQQQQMMMMMMMMFFFFFFFFFFFDDDDDDDDAAAAAKKKKKKKKKNNNNNNNNMMMMMMMMMMMMMMMMCCCCCCAAAAAAAAAADDDDDDDDPPPPPPPRRRRRRRRRRRHHHHHHHHHHGGGGRRRRRRRRRRRYYYYYYYYYYYYLLLLLLLLTTTTTTTAAAAASSSSSSAAAAALLLLLLLLFFFFFFFFFFFRRRRRRRRRRRGGGGRRRRRRRRRRRMMMMMMMMSSSSSSTTTTTTTKKKKKKKKKEEEEEEEEEVVVVVVVDDDDDDDDEEEEEEEEEQQQQQQQQQMMMMMMMMLLLLLLLLNNNNNNNNVVVVVVVQQQQQQQQQNNNNNNNNKKKKKKKKKNNNNNNNNSSSSSSSSSSSSYYYYYYYYYYYYFFFFFFFFFFFVVVVVVVEEEEEEEEEWWWWWWWWWWWWWWIIIIIIIIPPPPPPPNNNNNNNNNNNNNNNNIIIIIIIIKKKKKKKKKSSSSSSSSSSSSIIIIIIIICCCCCCDDDDDDDDIIIIIIIIPPPPPPPPPPPPPPKKKKKKKKKGGGGLLLLLLLLKKKKKKKKKMMMMMMMMAAAAAVVVVVVVTTTTTTTFFFFFFFFFFFVVVVVVVGGGGNNNNNNNNSSSSSSTTTTTTTAAAAAIIIIIIIIQQQQQQQQQEEEEEEEEEMMMMMMMMFFFFFFFFFFFKKKKKKKKKRRRRRRRRRRRVVVVVVVAAAAAEEEEEEEEEQQQQQQQQQFFFFFFFFFFFTTTTTTTAAAAAMMMMMMMMFFFFFFFFFFFRRRRRRRRRRRRRRRRRRRRRRKKKKKKKKKAAAAAFFFFFFFFFFFLLLLLLLLHHHHHHHHHHWWWWWWWWWWWWWWYYYYYYYYYYYYTTTTTTTGGGGEEEEEEEEEGGGGMMMMMMMMDDDDDDDDEEEEEEEEEMMMMMMMMEEEEEEEEEFFFFFFFFFFFTTTTTTTEEEEEEEEEAAAAAEEEEEEEEESSSSSSNNNNNNNNMMMMMMMMNNNNNNNNDDDDDDDDLLLLLLLLVVVVVVVSSSSSSEEEEEEEEEYYYYYYYYYYYYQQQQQQQQQQQQQQQQQQYYYYYYYYYYYYQQQQQQQQQDDDDDDDDAAAAATTTTTTTAAAAAEEEEEEEEEEEEEEEEEEEEEEEEEEEGGGGEEEEEEEEEFFFFFFFFFFFEEEEEEEEEEEEEEEEEEEEEEEEEEEGGGGEEEEEEEEEQQQQQQQQQQ

SEQ ID NO: 128 - protein, 3541 aa, Pisum sativum
MMMMMMMMRRRRRRRRRRRQQQQQQQQQIIIIIIIILLLLLLLLHHHHHHHHHHIIIIIIIIQQQQQQQQQGGGGGGGGQQQQQQQQQCCCCCCGGGGNNNNNNNNQQQQQQQQQIIIIIIIIGGGGAAAAAKKKKKKKKKFFFFFFFFFFFWWWWWWWWWWWWWWEEEEEEEEEVVVVVVVVVVVVVVCCCCCCAAAAAEEEEEEEEEHHHHHHHHHHGGGGIIIIIIIIDDDDDDDDPPPPPPPTTTTTTTGGGGRRRRRRRRRRRYYYYYYYYYYYYTTTTTTTGGGGDDDDDDDDSSSSSSDDDDDDDDLLLLLLLLQQQQQQQQQLLLLLLLLEEEEEEEEERRRRRRRRRRRIIIIIIIIDDDDDDDDVVVVVVVYYYYYYYYYYYYYYYYYYYYYYYYNNNNNNNNEEEEEEEEEAAAAASSSSSSGGGGGGGGRRRRRRRRRRRFFFFFFFFFFFVVVVVVVPPPPPPPRRRRRRRRRRRAAAAAVVVVVVVLLLLLLLLMMMMMMMMDDDDDDDDLLLLLLLLEEEEEEEEEPPPPPPPGGGGTTTTTTTMMMMMMMMDDDDDDDDSSSSSSIIIIIIIIRRRRRRRRRRRSSSSSSGGGGPPPPPPPYYYYYYYYYYYYGGGGQQQQQQQQQIIIIIIIIFFFFFFFFFFFRRRRRRRRRRRPPPPPPPDDDDDDDDNNNNNNNNFFFFFFFFFFFVVVVVVVFFFFFFFFFFFGGGGQQQQQQQQQSSSSSSGGGGAAAAAGGGGNNNNNNNNNNNNNNNNWWWWWWWWWWWWWWAAAAAKKKKKKKKKGGGGHHHHHHHHHHYYYYYYYYYYYYTTTTTTTEEEEEEEEEGGGGAAAAAEEEEEEEEELLLLLLLLIIIIIIIIDDDDDDDDSSSSSSVVVVVVVLLLLLLLLDDDDDDDDVVVVVVVVVVVVVVRRRRRRRRRRRKKKKKKKKKEEEEEEEEEAAAAAEEEEEEEEENNNNNNNNCCCCCCDDDDDDDDCCCCCCLLLLLLLLQQQQQQQQQGGGGFFFFFFFFFFFQQQQQQQQQVVVVVVVCCCCCCHHHHHHHHHHSSSSSSLLLLLLLLGGGGGGGGGGGGTTTTTTTGGGGSSSSSSGGGGMMMMMMMMGGGGTTTTTTTLLLLLLLLLLLLLLLLIIIIIIIISSSSSSKKKKKKKKKIIIIIIIIRRRRRRRRRRREEEEEEEEEEEEEEEEEEYYYYYYYYYYYYPPPPPPPDDDDDDDDRRRRRRRRRRRMMMMMMMMMMMMMMMMLLLLLLLLTTTTTTTFFFFFFFFFFFSSSSSSVVVVVVVFFFFFFFFFFFPPPPPPPSSSSSSPPPPPPPKKKKKKKKKVVVVVVVSSSSSSDDDDDDDDTTTTTTTVVVVVVVVVVVVVVEEEEEEEEEPPPPPPPYYYYYYYYYYYYNNNNNNNNAAAAATTTTTTTLLLLLLLLSSSSSSVVVVVVVHHHHHHHHHHQQQQQQQQQLLLLLLLLVVVVVVVEEEEEEEEENNNNNNNNAAAAADDDDDDDDEEEEEEEEEVVVVVVVMMMMMMMMVVVVVVVLLLLLLLLDDDDDDDDNNNNNNNNEEEEEEEEEAAAAALLLLLLLLYYYYYYYYYYYYDDDDDDDDIIIIIIIICCCCCCFFFFFFFFFFFRRRRRRRRRRRIIIIIIIILLLLLLLLKKKKKKKKKLLLLLLLLSSSSSSNNNNNNNNPPPPPPPSSSSSSFFFFFFFFFFFGGGGDDDDDDDDLLLLLLLLNNNNNNNNHHHHHHHHHHLLLLLLLLIIIIIIIISSSSSSAAAAATTTTTTTMMMMMMMMSSSSSSGGGGVVVVVVVTTTTTTTCCCCCCCCCCCCLLLLLLLLRRRRRRRRRRRFFFFFFFFFFFPPPPPPPGGGGQQQQQQQQQLLLLLLLLNNNNNNNNSSSSSSDDDDDDDDLLLLLLLLRRRRRRRRRRRKKKKKKKKKLLLLLLLLAAAAAVVVVVVVNNNNNNNNLLLLLLLLIIIIIIIIPPPPPPPFFFFFFFFFFFPPPPPPPRRRRRRRRRRRLLLLLLLLHHHHHHHHHHFFFFFFFFFFFFFFFFFFFFFFMMMMMMMMVVVVVVVGGGGFFFFFFFFFFFAAAAAPPPPPPPLLLLLLLLTTTTTTTSSSSSSRRRRRRRRRRRGGGGSSSSSSQQQQQQQQQQQQQQQQQQYYYYYYYYYYYYRRRRRRRRRRRTTTTTTTLLLLLLLLSSSSSSVVVVVVVPPPPPPPEEEEEEEEELLLLLLLLTTTTTTTQQQQQQQQQQQQQQQQQQMMMMMMMMWWWWWWWWWWWWWWDDDDDDDDAAAAAKKKKKKKKKNNNNNNNNMMMMMMMMMMMMMMMMCCCCCCAAAAAAAAAADDDDDDDDPPPPPPPRRRRRRRRRRRHHHHHHHHHHGGGGRRRRRRRRRRRYYYYYYYYYYYYLLLLLLLLTTTTTTTAAAAASSSSSSAAAAAMMMMMMMMFFFFFFFFFFFRRRRRRRRRRRGGGGKKKKKKKKKMMMMMMMMSSSSSSTTTTTTTKKKKKKKKKEEEEEEEEEVVVVVVVDDDDDDDDEEEEEEEEEQQQQQQQQQMMMMMMMMMMMMMMMMNNNNNNNNVVVVVVVQQQQQQQQQNNNNNNNNKKKKKKKKKNNNNNNNNSSSSSSSSSSSSYYYYYYYYYYYYFFFFFFFFFFFVVVVVVVEEEEEEEEEWWWWWWWWWWWWWWIIIIIIIIPPPPPPPNNNNNNNNNNNNNNNNVVVVVVVKKKKKKKKKSSSSSSTTTTTTTVVVVVVVCCCCCCDDDDDDDDIIIIIIIIPPPPPPPPPPPPPPTTTTTTTGGGGLLLLLLLLKKKKKKKKKMMMMMMMMAAAAASSSSSSTTTTTTTFFFFFFFFFFFIIIIIIIIGGGGNNNNNNNNSSSSSSTTTTTTTSSSSSSIIIIIIIIQQQQQQQQQEEEEEEEEEMMMMMMMMFFFFFFFFFFFRRRRRRRRRRRRRRRRRRRRRRVVVVVVVSSSSSSEEEEEEEEEQQQQQQQQQFFFFFFFFFFFTTTTTTTAAAAAMMMMMMMMFFFFFFFFFFFRRRRRRRRRRRRRRRRRRRRRRKKKKKKKKKAAAAAFFFFFFFFFFFLLLLLLLLHHHHHHHHHHWWWWWWWWWWWWWWYYYYYYYYYYYYTTTTTTTGGGGEEEEEEEEEGGGGMMMMMMMMDDDDDDDDEEEEEEEEEMMMMMMMMEEEEEEEEEFFFFFFFFFFFTTTTTTTEEEEEEEEEAAAAAEEEEEEEEESSSSSSNNNNNNNNMMMMMMMMNNNNNNNNDDDDDDDDLLLLLLLLVVVVVVVAAAAAEEEEEEEEEYYYYYYYYYYYYQQQQQQQQQQQQQQQQQQYYYYYYYYYYYYQQQQQQQQQDDDDDDDDAAAAATTTTTTTAAAAADDDDDDDDEEEEEEEEEDDDDDDDDEEEEEEEEEYYYYYYYYYYYYGGGGEEEEEEEEEEEEEEEEEEEEEEEEEEEGGGGDDDDDDDDEEEEEEEEEEEEEEEEEEEEEEEEEEEYYYYYYYYYYYYGGGGQQQQQQQQQHHHHHHHHHHDDDDDDDDIIIIIIIII

SEQ ID NO: 129 - protein, 3657 aa, Physarum polycephalum
MMMMMMMMRRRRRRRRRRREEEEEEEEEIIIIIIIIVVVVVVVHHHHHHHHHHIIIIIIIIQQQQQQQQQAAAAAGGGGQQQQQQQQQCCCCCCGGGGNNNNNNNNQQQQQQQQQIIIIIIIIGGGGAAAAAKKKKKKKKKFFFFFFFFFFFWWWWWWWWWWWWWWEEEEEEEEEVVVVVVVIIIIIIIISSSSSSDDDDDDDDEEEEEEEEEHHHHHHHHHHGGGGIIIIIIIIDDDDDDDDPPPPPPPTTTTTTTGGGGSSSSSSYYYYYYYYYYYYHHHHHHHHHHGGGGEEEEEEEEESSSSSSDDDDDDDDLLLLLLLLQQQQQQQQQLLLLLLLLEEEEEEEEERRRRRRRRRRRIIIIIIIINNNNNNNNVVVVVVVYYYYYYYYYYYYYYYYYYYYYYYYNNNNNNNNEEEEEEEEEAAAAATTTTTTTGGGGGGGGKKKKKKKKKYYYYYYYYYYYYVVVVVVVPPPPPPPRRRRRRRRRRRAAAAAVVVVVVVLLLLLLLLVVVVVVVDDDDDDDDLLLLLLLLEEEEEEEEEPPPPPPPGGGGTTTTTTTMMMMMMMMDDDDDDDDSSSSSSVVVVVVVRRRRRRRRRRRAAAAAGGGGPPPPPPPFFFFFFFFFFFGGGGQQQQQQQQQIIIIIIIIFFFFFFFFFFFRRRRRRRRRRRPPPPPPPDDDDDDDDNNNNNNNNFFFFFFFFFFFVVVVVVVFFFFFFFFFFFGGGGQQQQQQQQQTTTTTTTGGGGAAAAAGGGGNNNNNNNNNNNNNNNNWWWWWWWWWWWWWWAAAAAKKKKKKKKKGGGGHHHHHHHHHHYYYYYYYYYYYYTTTTTTTEEEEEEEEEGGGGAAAAAEEEEEEEEELLLLLLLLIIIIIIIIDDDDDDDDSSSSSSVVVVVVVLLLLLLLLDDDDDDDDVVVVVVVVVVVVVVRRRRRRRRRRRKKKKKKKKKEEEEEEEEEAAAAAEEEEEEEEESSSSSSCCCCCCDDDDDDDDCCCCCCLLLLLLLLQQQQQQQQQGGGGFFFFFFFFFFFQQQQQQQQQIIIIIIIIAAAAAHHHHHHHHHHSSSSSSLLLLLLLLGGGGGGGGGGGGTTTTTTTGGGGSSSSSSGGGGMMMMMMMMGGGGTTTTTTTLLLLLLLLLLLLLLLLIIIIIIIISSSSSSKKKKKKKKKIIIIIIIIRRRRRRRRRRREEEEEEEEEEEEEEEEEEYYYYYYYYYYYYPPPPPPPDDDDDDDDRRRRRRRRRRRMMMMMMMMMMMMMMMMCCCCCCTTTTTTTFFFFFFFFFFFSSSSSSVVVVVVVVVVVVVVPPPPPPPSSSSSSPPPPPPPKKKKKKKKKVVVVVVVSSSSSSDDDDDDDDTTTTTTTVVVVVVVVVVVVVVEEEEEEEEEPPPPPPPYYYYYYYYYYYYNNNNNNNNAAAAATTTTTTTLLLLLLLLSSSSSSVVVVVVVHHHHHHHHHHQQQQQQQQQLLLLLLLLVVVVVVVEEEEEEEEENNNNNNNNAAAAADDDDDDDDEEEEEEEEEVVVVVVVMMMMMMMMCCCCCCIIIIIIIIDDDDDDDDNNNNNNNNEEEEEEEEEAAAAALLLLLLLLYYYYYYYYYYYYDDDDDDDDIIIIIIIISSSSSSFFFFFFFFFFFRRRRRRRRRRRTTTTTTTLLLLLLLLKKKKKKKKKLLLLLLLLTTTTTTTTTTTTTTPPPPPPPTTTTTTTYYYYYYYYYYYYGGGGDDDDDDDDLLLLLLLLNNNNNNNNHHHHHHHHHHLLLLLLLLVVVVVVVSSSSSSAAAAAVVVVVVVMMMMMMMMSSSSSSGGGGIIIIIIIITTTTTTTCCCCCCCCCCCCLLLLLLLLRRRRRRRRRRRFFFFFFFFFFFPPPPPPPGGGGQQQQQQQQQLLLLLLLLNNNNNNNNSSSSSSDDDDDDDDLLLLLLLLRRRRRRRRRRRKKKKKKKKKLLLLLLLLAAAAAVVVVVVVNNNNNNNNLLLLLLLLIIIIIIIIPPPPPPPFFFFFFFFFFFPPPPPPPRRRRRRRRRRRLLLLLLLLHHHHHHHHHHFFFFFFFFFFFFFFFFFFFFFFLLLLLLLLVVVVVVVGGGGFFFFFFFFFFFAAAAAPPPPPPPLLLLLLLLTTTTTTTSSSSSSRRRRRRRRRRRGGGGSSSSSSVVVVVVVGGGGYYYYYYYYYYYYRRRRRRRRRRRSSSSSSLLLLLLLLTTTTTTTVVVVVVVPPPPPPPEEEEEEEEELLLLLLLLTTTTTTTQQQQQQQQQQQQQQQQQQMMMMMMMMFFFFFFFFFFFDDDDDDDDAAAAAKKKKKKKKKNNNNNNNNMMMMMMMMMMMMMMMMAAAAAAAAAASSSSSSDDDDDDDDPPPPPPPRRRRRRRRRRRHHHHHHHHHHGGGGRRRRRRRRRRRYYYYYYYYYYYYLLLLLLLLTTTTTTTAAAAASSSSSSAAAAAMMMMMMMMFFFFFFFFFFFRRRRRRRRRRRGGGGRRRRRRRRRRRMMMMMMMMSSSSSSTTTTTTTKKKKKKKKKEEEEEEEEEVVVVVVVDDDDDDDDEEEEEEEEEQQQQQQQQQMMMMMMMMLLLLLLLLNNNNNNNNVVVVVVVQQQQQQQQQNNNNNNNNKKKKKKKKKNNNNNNNNSSSSSSSSSSSSYYYYYYYYYYYYFFFFFFFFFFFVVVVVVVEEEEEEEEEWWWWWWWWWWWWWWIIIIIIIIPPPPPPPNNNNNNNNNNNNNNNNIIIIIIIIKKKKKKKKKSSSSSSSSSSSSVVVVVVVCCCCCCDDDDDDDDIIIIIIIIPPPPPPPPPPPPPPKKKKKKKKKGGGGLLLLLLLLKKKKKKKKKMMMMMMMMAAAAAVVVVVVVTTTTTTTFFFFFFFFFFFIIIIIIIIGGGGNNNNNNNNSSSSSSTTTTTTTAAAAAIIIIIIIIQQQQQQQQQEEEEEEEEELLLLLLLLFFFFFFFFFFFKKKKKKKKKRRRRRRRRRRRVVVVVVVSSSSSSEEEEEEEEEQQQQQQQQQFFFFFFFFFFFTTTTTTTAAAAAMMMMMMMMFFFFFFFFFFFRRRRRRRRRRRRRRRRRRRRRRKKKKKKKKKAAAAAFFFFFFFFFFFLLLLLLLLHHHHHHHHHHWWWWWWWWWWWWWWYYYYYYYYYYYYTTTTTTTGGGGEEEEEEEEEGGGGMMMMMMMMDDDDDDDDEEEEEEEEEMMMMMMMMEEEEEEEEEFFFFFFFFFFFTTTTTTTEEEEEEEEEAAAAAEEEEEEEEESSSSSSNNNNNNNNMMMMMMMMNNNNNNNNDDDDDDDDLLLLLLLLVVVVVVVSSSSSSEEEEEEEEEYYYYYYYYYYYYQQQQQQQQQQQQQQQQQQYYYYYYYYYYYYQQQQQQQQQDDDDDDDDAAAAATTTTTTTIIIIIIIIDDDDDDDDDDDDDDDDEEEEEEEEEEEEEEEEEEGGGGGGGGEEEEEEEEEEEEEEEEEEEEEEEEEEEEEEEEEEEEGGGGGGGGAAAAAEEEEEEEEEEEEEEEEEEEEEEEEEEEAAAAARRRRRRRRRRRQQQQQQQQQRRRRRRRRRRRKKKKKKKKKHHHHHHHHHHYYYYYYYYYYYYVVVVVVVIIIIIIIIDDDDDDDDYYYYYYYYYYYYVVVVVVVPPPPPPPSSSSSSVVVVVVVCCCCCCVVVVVVVIIIIIIIILLLLLLLLIIIIIIIIRRRRRRRRRRRR

SEQ ID NO: 130 - protein, 3511 aa, Porphyra purpurea
MMMMMMMMRRRRRRRRRRREEEEEEEEEIIIIIIIIVVVVVVVHHHHHHHHHHIIIIIIIIQQQQQQQQQAAAAAGGGGQQQQQQQQQCCCCCCGGGGNNNNNNNNQQQQQQQQQIIIIIIIIGGGGAAAAAKKKKKKKKKFFFFFFFFFFFWWWWWWWWWWWWWWEEEEEEEEEVVVVVVVIIIIIIIISSSSSSEEEEEEEEEEEEEEEEEEHHHHHHHHHHGGGGIIIIIIIIDDDDDDDDSSSSSSSSSSSSGGGGAAAAAYYYYYYYYYYYYNNNNNNNNGGGGTTTTTTTSSSSSSDDDDDDDDLLLLLLLLQQQQQQQQQLLLLLLLLDDDDDDDDRRRRRRRRRRRAAAAAEEEEEEEEEVVVVVVVYYYYYYYYYYYYYYYYYYYYYYYYNNNNNNNNEEEEEEEEEGGGGSSSSSSGGGGGGGGRRRRRRRRRRRYYYYYYYYYYYYVVVVVVVPPPPPPPRRRRRRRRRRRAAAAAVVVVVVVLLLLLLLLVVVVVVVDDDDDDDDLLLLLLLLEEEEEEEEEPPPPPPPGGGGVVVVVVVLLLLLLLLDDDDDDDDTTTTTTTIIIIIIIIKKKKKKKKKAAAAAGGGGPPPPPPPHHHHHHHHHHGGGGGGGGLLLLLLLLYYYYYYYYYYYYRRRRRRRRRRRPPPPPPPDDDDDDDDNNNNNNNNFFFFFFFFFFFVVVVVVVAAAAAGGGGQQQQQQQQQSSSSSSGGGGAAAAAGGGGNNNNNNNNNNNNNNNNWWWWWWWWWWWWWWAAAAAKKKKKKKKKGGGGHHHHHHHHHHYYYYYYYYYYYYTTTTTTTEEEEEEEEEGGGGAAAAAEEEEEEEEELLLLLLLLVVVVVVVDDDDDDDDSSSSSSVVVVVVVLLLLLLLLDDDDDDDDVVVVVVVVVVVVVVRRRRRRRRRRRRRRRRRRRRRREEEEEEEEEAAAAAEEEEEEEEEGGGGCCCCCCDDDDDDDDCCCCCCLLLLLLLLQQQQQQQQQGGGGFFFFFFFFFFFQQQQQQQQQVVVVVVVTTTTTTTHHHHHHHHHHSSSSSSLLLLLLLLGGGGGGGGGGGGTTTTTTTGGGGSSSSSSGGGGMMMMMMMMGGGGTTTTTTTLLLLLLLLLLLLLLLLVVVVVVVSSSSSSKKKKKKKKKIIIIIIIIRRRRRRRRRRREEEEEEEEEEEEEEEEEEFFFFFFFFFFFPPPPPPPDDDDDDDDRRRRRRRRRRRMMMMMMMMMMMMMMMMCCCCCCTTTTTTTYYYYYYYYYYYYSSSSSSVVVVVVVMMMMMMMMPPPPPPPSSSSSSPPPPPPPKKKKKKKKKVVVVVVVSSSSSSDDDDDDDDTTTTTTTVVVVVVVVVVVVVVEEEEEEEEEPPPPPPPYYYYYYYYYYYYNNNNNNNNCCCCCCTTTTTTTLLLLLLLLSSSSSSVVVVVVVHHHHHHHHHHQQQQQQQQQLLLLLLLLVVVVVVVEEEEEEEEENNNNNNNNAAAAADDDDDDDDAAAAAVVVVVVVFFFFFFFFFFFCCCCCCIIIIIIIIDDDDDDDDNNNNNNNNEEEEEEEEEAAAAALLLLLLLLYYYYYYYYYYYYNNNNNNNNIIIIIIIICCCCCCYYYYYYYYYYYYNNNNNNNNTTTTTTTLLLLLLLLKKKKKKKKKKKKKKKKKKPPPPPPPEEEEEEEEEPPPPPPPAAAAAYYYYYYYYYYYYPPPPPPPDDDDDDDDLLLLLLLLNNNNNNNNKKKKKKKKKLLLLLLLLVVVVVVVSSSSSSGGGGVVVVVVVMMMMMMMMSSSSSSGGGGIIIIIIIITTTTTTTSSSSSSSSSSSSLLLLLLLLRRRRRRRRRRRFFFFFFFFFFFPPPPPPPGGGGQQQQQQQQQLLLLLLLLNNNNNNNNSSSSSSDDDDDDDDLLLLLLLLRRRRRRRRRRRKKKKKKKKKLLLLLLLLAAAAAVVVVVVVNNNNNNNNLLLLLLLLVVVVVVVPPPPPPPFFFFFFFFFFFPPPPPPPRRRRRRRRRRRLLLLLLLLHHHHHHHHHHFFFFFFFFFFFFFFFFFFFFFFMMMMMMMMIIIIIIIIGGGGYYYYYYYYYYYYAAAAAPPPPPPPLLLLLLLLSSSSSSAAAAADDDDDDDDGGGGVVVVVVVTTTTTTTAAAAAYYYYYYYYYYYYRRRRRRRRRRRAAAAAKKKKKKKKKTTTTTTTVVVVVVVAAAAADDDDDDDDLLLLLLLLTTTTTTTKKKKKKKKKQQQQQQQQQMMMMMMMMFFFFFFFFFFFDDDDDDDDPPPPPPPKKKKKKKKKNNNNNNNNMMMMMMMMMMMMMMMMAAAAADDDDDDDDCCCCCCDDDDDDDDPPPPPPPRRRRRRRRRRRNNNNNNNNGGGGRRRRRRRRRRRYYYYYYYYYYYYLLLLLLLLTTTTTTTAAAAASSSSSSAAAAAYYYYYYYYYYYYFFFFFFFFFFFRRRRRRRRRRRGGGGHHHHHHHHHHVVVVVVVSSSSSSTTTTTTTKKKKKKKKKEEEEEEEEEVVVVVVVEEEEEEEEEEEEEEEEEEQQQQQQQQQMMMMMMMMDDDDDDDDAAAAAIIIIIIIIQQQQQQQQQTTTTTTTKKKKKKKKKNNNNNNNNSSSSSSGGGGQQQQQQQQQFFFFFFFFFFFIIIIIIIIDDDDDDDDWWWWWWWWWWWWWWIIIIIIIIPPPPPPPNNNNNNNNAAAAAIIIIIIIIKKKKKKKKKAAAAASSSSSSVVVVVVVCCCCCCDDDDDDDDVVVVVVVAAAAAPPPPPPPTTTTTTTGGGGEEEEEEEEETTTTTTTMMMMMMMMSSSSSSAAAAAAAAAAFFFFFFFFFFFIIIIIIIIGGGGNNNNNNNNSSSSSSTTTTTTTAAAAAIIIIIIIIQQQQQQQQQDDDDDDDDIIIIIIIIFFFFFFFFFFFKKKKKKKKKRRRRRRRRRRRVVVVVVVGGGGSSSSSSHHHHHHHHHHFFFFFFFFFFFSSSSSSAAAAAMMMMMMMMFFFFFFFFFFFKKKKKKKKKRRRRRRRRRRRKKKKKKKKKAAAAAFFFFFFFFFFFLLLLLLLLHHHHHHHHHHWWWWWWWWWWWWWWYYYYYYYYYYYYTTTTTTTGGGGEEEEEEEEEGGGGMMMMMMMMDDDDDDDDEEEEEEEEEMMMMMMMMEEEEEEEEEFFFFFFFFFFFTTTTTTTEEEEEEEEEAAAAAEEEEEEEEESSSSSSNNNNNNNNMMMMMMMMNNNNNNNNDDDDDDDDLLLLLLLLVVVVVVVSSSSSSEEEEEEEEELLLLLLLLQQQQQQQQQQQQQQQQQQYYYYYYYYYYYYEEEEEEEEEAAAAAAAAAATTTTTTTVVVVVVVEEEEEEEEEGGGGEEEEEEEEEEEEEEEEEEEEEEEEEEEEEEEEEEEEDDDDDDDDAAAAAYYYYYYYYYYYYAAAAAEEEEEEEEEGGGGAAAAAVVVVVVVVVVVVVVNNNNNNNNGGGGDDDDDDDDQQQQQQQQQSSSSSSYYYYYYYYYYYYEEEEEEEEEDDDDDDDDQQQQQQQQQYYYYYYYYYYYYAAAAAAAAAAA

SEQ ID NO: 131 - protein, 3504 aa, Rattus norvegicus
MMMMMMMMRRRRRRRRRRREEEEEEEEEIIIIIIIIVVVVVVVHHHHHHHHHHIIIIIIIIQQQQQQQQQAAAAAGGGGQQQQQQQQQCCCCCCGGGGNNNNNNNNQQQQQQQQQIIIIIIIIGGGGPPPPPPPKKKKKKKKKFFFFFFFFFFFWWWWWWWWWWWWWWEEEEEEEEEVVVVVVVIIIIIIIISSSSSSDDDDDDDDEEEEEEEEEHHHHHHHHHHGGGGIIIIIIIIDDDDDDDDPPPPPPPTTTTTTTGGGGSSSSSSYYYYYYYYYYYYHHHHHHHHHHGGGGDDDDDDDDSSSSSSDDDDDDDDLLLLLLLLQQQQQQQQQLLLLLLLLEEEEEEEEERRRRRRRRRRRIIIIIIIINNNNNNNNVVVVVVVYYYYYYYYYYYYYYYYYYYYYYYYNNNNNNNNEEEEEEEEEAAAAAAAAAAGGGGNNNNNNNNKKKKKKKKKYYYYYYYYYYYYVVVVVVVPPPPPPPRRRRRRRRRRRAAAAAIIIIIIIILLLLLLLLVVVVVVVDDDDDDDDLLLLLLLLEEEEEEEEEPPPPPPPGGGGTTTTTTTMMMMMMMMDDDDDDDDSSSSSSVVVVVVVRRRRRRRRRRRSSSSSSGGGGPPPPPPPFFFFFFFFFFFGGGGQQQQQQQQQIIIIIIIIFFFFFFFFFFFRRRRRRRRRRRPPPPPPPDDDDDDDDNNNNNNNNFFFFFFFFFFFVVVVVVVFFFFFFFFFFFGGGGQQQQQQQQQSSSSSSGGGGAAAAAGGGGNNNNNNNNNNNNNNNNWWWWWWWWWWWWWWAAAAAKKKKKKKKKGGGGHHHHHHHHHHYYYYYYYYYYYYTTTTTTTEEEEEEEEEGGGGAAAAAEEEEEEEEELLLLLLLLVVVVVVVDDDDDDDDSSSSSSVVVVVVVLLLLLLLLDDDDDDDDVVVVVVVVVVVVVVRRRRRRRRRRRKKKKKKKKKEEEEEEEEESSSSSSEEEEEEEEESSSSSSCCCCCCDDDDDDDDCCCCCCLLLLLLLLQQQQQQQQQGGGGFFFFFFFFFFFQQQQQQQQQLLLLLLLLTTTTTTTHHHHHHHHHHSSSSSSLLLLLLLLGGGGGGGGGGGGTTTTTTTGGGGSSSSSSGGGGMMMMMMMMGGGGTTTTTTTLLLLLLLLLLLLLLLLIIIIIIIISSSSSSKKKKKKKKKIIIIIIIIRRRRRRRRRRREEEEEEEEEEEEEEEEEEYYYYYYYYYYYYPPPPPPPDDDDDDDDRRRRRRRRRRRIIIIIIIIMMMMMMMMNNNNNNNNTTTTTTTFFFFFFFFFFFSSSSSSVVVVVVVMMMMMMMMPPPPPPPSSSSSSPPPPPPPKKKKKKKKKVVVVVVVSSSSSSDDDDDDDDTTTTTTTVVVVVVVVVVVVVVEEEEEEEEEPPPPPPPYYYYYYYYYYYYNNNNNNNNAAAAATTTTTTTLLLLLLLLSSSSSSVVVVVVVHHHHHHHHHHQQQQQQQQQLLLLLLLLVVVVVVVEEEEEEEEENNNNNNNNTTTTTTTDDDDDDDDEEEEEEEEETTTTTTTYYYYYYYYYYYYCCCCCCIIIIIIIIDDDDDDDDNNNNNNNNEEEEEEEEEAAAAALLLLLLLLYYYYYYYYYYYYDDDDDDDDIIIIIIIICCCCCCFFFFFFFFFFFRRRRRRRRRRRTTTTTTTLLLLLLLLKKKKKKKKKLLLLLLLLTTTTTTTTTTTTTTPPPPPPPTTTTTTTYYYYYYYYYYYYGGGGDDDDDDDDLLLLLLLLNNNNNNNNHHHHHHHHHHLLLLLLLLVVVVVVVSSSSSSAAAAATTTTTTTMMMMMMMMSSSSSSGGGGVVVVVVVTTTTTTTTTTTTTTCCCCCCLLLLLLLLRRRRRRRRRRRFFFFFFFFFFFPPPPPPPGGGGQQQQQQQQQLLLLLLLLNNNNNNNNAAAAADDDDDDDDLLLLLLLLRRRRRRRRRRRKKKKKKKKKLLLLLLLLAAAAAVVVVVVVNNNNNNNNMMMMMMMMVVVVVVVPPPPPPPFFFFFFFFFFFPPPPPPPRRRRRRRRRRRLLLLLLLLHHHHHHHHHHFFFFFFFFFFFFFFFFFFFFFFMMMMMMMMPPPPPPPGGGGFFFFFFFFFFFAAAAAPPPPPPPLLLLLLLLTTTTTTTSSSSSSRRRRRRRRRRRGGGGSSSSSSQQQQQQQQQQQQQQQQQQYYYYYYYYYYYYRRRRRRRRRRRAAAAALLLLLLLLTTTTTTTVVVVVVVPPPPPPPEEEEEEEEELLLLLLLLTTTTTTTQQQQQQQQQQQQQQQQQQMMMMMMMMFFFFFFFFFFFDDDDDDDDSSSSSSKKKKKKKKKNNNNNNNNMMMMMMMMMMMMMMMMAAAAAAAAAACCCCCCDDDDDDDDPPPPPPPRRRRRRRRRRRHHHHHHHHHHGGGGRRRRRRRRRRRYYYYYYYYYYYYLLLLLLLLTTTTTTTVVVVVVVAAAAAAAAAAIIIIIIIIFFFFFFFFFFFRRRRRRRRRRRGGGGRRRRRRRRRRRMMMMMMMMSSSSSSMMMMMMMMKKKKKKKKKEEEEEEEEEVVVVVVVDDDDDDDDEEEEEEEEEQQQQQQQQQMMMMMMMMLLLLLLLLNNNNNNNNVVVVVVVQQQQQQQQQNNNNNNNNKKKKKKKKKNNNNNNNNSSSSSSSSSSSSYYYYYYYYYYYYFFFFFFFFFFFVVVVVVVEEEEEEEEEWWWWWWWWWWWWWWIIIIIIIIPPPPPPPNNNNNNNNNNNNNNNNVVVVVVVKKKKKKKKKTTTTTTTAAAAAVVVVVVVCCCCCCDDDDDDDDIIIIIIIIPPPPPPPPPPPPPPRRRRRRRRRRRGGGGLLLLLLLLKKKKKKKKKMMMMMMMMSSSSSSAAAAATTTTTTTFFFFFFFFFFFIIIIIIIIGGGGNNNNNNNNSSSSSSTTTTTTTAAAAAIIIIIIIIQQQQQQQQQEEEEEEEEELLLLLLLLFFFFFFFFFFFKKKKKKKKKRRRRRRRRRRRIIIIIIIISSSSSSEEEEEEEEEQQQQQQQQQFFFFFFFFFFFTTTTTTTAAAAAMMMMMMMMFFFFFFFFFFFRRRRRRRRRRRRRRRRRRRRRRKKKKKKKKKAAAAAFFFFFFFFFFFLLLLLLLLHHHHHHHHHHWWWWWWWWWWWWWWYYYYYYYYYYYYTTTTTTTGGGGEEEEEEEEEGGGGMMMMMMMMDDDDDDDDEEEEEEEEEMMMMMMMMEEEEEEEEEFFFFFFFFFFFTTTTTTTEEEEEEEEEAAAAAEEEEEEEEESSSSSSNNNNNNNNMMMMMMMMNNNNNNNNEEEEEEEEELLLLLLLLVVVVVVVSSSSSSEEEEEEEEEYYYYYYYYYYYYQQQQQQQQQQQQQQQQQQYYYYYYYYYYYYQQQQQQQQQDDDDDDDDAAAAATTTTTTTAAAAADDDDDDDDEEEEEEEEEQQQQQQQQQGGGGEEEEEEEEEFFFFFFFFFFFEEEEEEEEEEEEEEEEEEEEEEEEEEEEEEEEEEEEGGGGEEEEEEEEEDDDDDDDDEEEEEEEEEAAAAAA

SEQ ID NO: 132 - protein, 3534 aa, Solanum tuberosum
MMMMMMMMRRRRRRRRRRREEEEEEEEEIIIIIIIILLLLLLLLHHHHHHHHHHIIIIIIIIQQQQQQQQQGGGGGGGGQQQQQQQQQCCCCCCGGGGNNNNNNNNQQQQQQQQQIIIIIIIIGGGGSSSSSSKKKKKKKKKFFFFFFFFFFFWWWWWWWWWWWWWWEEEEEEEEEVVVVVVVIIIIIIIICCCCCCDDDDDDDDEEEEEEEEEHHHHHHHHHHGGGGVVVVVVVDDDDDDDDPPPPPPPTTTTTTTGGGGRRRRRRRRRRRYYYYYYYYYYYYKKKKKKKKKGGGGTTTTTTTAAAAAAAAAAEEEEEEEEESSSSSSDDDDDDDDLLLLLLLLQQQQQQQQQLLLLLLLLEEEEEEEEERRRRRRRRRRRIIIIIIIINNNNNNNNVVVVVVVYYYYYYYYYYYYFFFFFFFFFFFNNNNNNNNEEEEEEEEEAAAAASSSSSSGGGGGGGGRRRRRRRRRRRYYYYYYYYYYYYVVVVVVVPPPPPPPRRRRRRRRRRRAAAAAVVVVVVVLLLLLLLLMMMMMMMMDDDDDDDDLLLLLLLLEEEEEEEEEPPPPPPPGGGGTTTTTTTMMMMMMMMDDDDDDDDSSSSSSIIIIIIIIRRRRRRRRRRRSSSSSSGGGGPPPPPPPYYYYYYYYYYYYGGGGQQQQQQQQQIIIIIIIIFFFFFFFFFFFRRRRRRRRRRRPPPPPPPDDDDDDDDNNNNNNNNLLLLLLLLVVVVVVVFFFFFFFFFFFGGGGQQQQQQQQQSSSSSSGGGGAAAAAGGGGNNNNNNNNNNNNNNNNWWWWWWWWWWWWWWAAAAAKKKKKKKKKGGGGHHHHHHHHHHYYYYYYYYYYYYTTTTTTTEEEEEEEEEGGGGAAAAAEEEEEEEEELLLLLLLLIIIIIIIIDDDDDDDDAAAAAVVVVVVVLLLLLLLLDDDDDDDDVVVVVVVVVVVVVVRRRRRRRRRRRKKKKKKKKKEEEEEEEEEAAAAAEEEEEEEEENNNNNNNNCCCCCCDDDDDDDDCCCCCCLLLLLLLLQQQQQQQQQGGGGFFFFFFFFFFFQQQQQQQQQVVVVVVVCCCCCCHHHHHHHHHHSSSSSSLLLLLLLLGGGGGGGGGGGGTTTTTTTGGGGSSSSSSGGGGMMMMMMMMGGGGTTTTTTTLLLLLLLLLLLLLLLLIIIIIIIISSSSSSKKKKKKKKKVVVVVVVRRRRRRRRRRREEEEEEEEEEEEEEEEEEYYYYYYYYYYYYPPPPPPPDDDDDDDDRRRRRRRRRRRMMMMMMMMMMMMMMMMLLLLLLLLTTTTTTTFFFFFFFFFFFSSSSSSVVVVVVVFFFFFFFFFFFPPPPPPPSSSSSSPPPPPPPKKKKKKKKKVVVVVVVSSSSSSDDDDDDDDTTTTTTTVVVVVVVVVVVVVVEEEEEEEEEPPPPPPPYYYYYYYYYYYYNNNNNNNNAAAAATTTTTTTLLLLLLLLSSSSSSVVVVVVVHHHHHHHHHHQQQQQQQQQLLLLLLLLVVVVVVVEEEEEEEEENNNNNNNNAAAAADDDDDDDDEEEEEEEEECCCCCCMMMMMMMMVVVVVVVLLLLLLLLDDDDDDDDNNNNNNNNEEEEEEEEEAAAAALLLLLLLLYYYYYYYYYYYYDDDDDDDDIIIIIIIICCCCCCFFFFFFFFFFFRRRRRRRRRRRTTTTTTTLLLLLLLLKKKKKKKKKLLLLLLLLTTTTTTTTTTTTTTPPPPPPPSSSSSSFFFFFFFFFFFGGGGDDDDDDDDLLLLLLLLNNNNNNNNHHHHHHHHHHLLLLLLLLIIIIIIIISSSSSSAAAAATTTTTTTMMMMMMMMSSSSSSGGGGVVVVVVVTTTTTTTCCCCCCCCCCCCLLLLLLLLRRRRRRRRRRRFFFFFFFFFFFPPPPPPPGGGGQQQQQQQQQLLLLLLLLNNNNNNNNSSSSSSDDDDDDDDLLLLLLLLRRRRRRRRRRRKKKKKKKKKLLLLLLLLAAAAAVVVVVVVNNNNNNNNLLLLLLLLIIIIIIIIPPPPPPPLLLLLLLLPPPPPPPRRRRRRRRRRRLLLLLLLLHHHHHHHHHHFFFFFFFFFFFFFFFFFFFFFFMMMMMMMMVVVVVVVGGGGFFFFFFFFFFFAAAAAPPPPPPPLLLLLLLLTTTTTTTSSSSSSRRRRRRRRRRRGGGGSSSSSSQQQQQQQQQQQQQQQQQQYYYYYYYYYYYYIIIIIIIISSSSSSLLLLLLLLTTTTTTTVVVVVVVPPPPPPPEEEEEEEEELLLLLLLLTTTTTTTQQQQQQQQQQQQQQQQQQMMMMMMMMWWWWWWWWWWWWWWDDDDDDDDAAAAAKKKKKKKKKNNNNNNNNMMMMMMMMMMMMMMMMCCCCCCAAAAAAAAAADDDDDDDDPPPPPPPRRRRRRRRRRRHHHHHHHHHHGGGGRRRRRRRRRRRYYYYYYYYYYYYLLLLLLLLTTTTTTTAAAAASSSSSSAAAAAMMMMMMMMFFFFFFFFFFFRRRRRRRRRRRGGGGKKKKKKKKKMMMMMMMMSSSSSSTTTTTTTKKKKKKKKKEEEEEEEEEVVVVVVVDDDDDDDDEEEEEEEEEQQQQQQQQQMMMMMMMMIIIIIIIINNNNNNNNVVVVVVVQQQQQQQQQNNNNNNNNKKKKKKKKKNNNNNNNNSSSSSSSSSSSSYYYYYYYYYYYYFFFFFFFFFFFVVVVVVVEEEEEEEEEWWWWWWWWWWWWWWIIIIIIIIPPPPPPPNNNNNNNNNNNNNNNNVVVVVVVKKKKKKKKKSSSSSSSSSSSSVVVVVVVCCCCCCDDDDDDDDIIIIIIIIPPPPPPPPPPPPPPTTTTTTTGGGGLLLLLLLLKKKKKKKKKMMMMMMMMAAAAASSSSSSTTTTTTTFFFFFFFFFFFVVVVVVVGGGGNNNNNNNNSSSSSSTTTTTTTSSSSSSIIIIIIIIQQQQQQQQQEEEEEEEEEMMMMMMMMFFFFFFFFFFFRRRRRRRRRRRRRRRRRRRRRRVVVVVVVSSSSSSEEEEEEEEEQQQQQQQQQFFFFFFFFFFFTTTTTTTAAAAAMMMMMMMMFFFFFFFFFFFRRRRRRRRRRRRRRRRRRRRRRKKKKKKKKKAAAAAFFFFFFFFFFFLLLLLLLLHHHHHHHHHHWWWWWWWWWWWWWWYYYYYYYYYYYYTTTTTTTGGGGEEEEEEEEEGGGGMMMMMMMMDDDDDDDDEEEEEEEEEMMMMMMMMEEEEEEEEEFFFFFFFFFFFTTTTTTTEEEEEEEEEAAAAAEEEEEEEEESSSSSSNNNNNNNNMMMMMMMMNNNNNNNNDDDDDDDDPPPPPPPVVVVVVVAAAAAEEEEEEEEEYYYYYYYYYYYYQQQQQQQQQQQQQQQQQQYYYYYYYYYYYYQQQQQQQQQDDDDDDDDAAAAATTTTTTTAAAAADDDDDDDDDDDDDDDDEEEEEEEEEEEEEEEEEEEEEEEEEEEYYYYYYYYYYYYDDDDDDDDDDDDDDDDEEEEEEEEEAAAAAAAAAADDDDDDDDDDDDDDDDHHHHHHHHHHQQQQQQQQQYYYYYYYYYYYYEEEEEEEEESSSSSSS

SEQ ID NO: 133 - protein, 3497 aa, Glycine max
MMMMMMMMRRRRRRRRRRREEEEEEEEEIIIIIIIILLLLLLLLHHHHHHHHHHVVVVVVVQQQQQQQQQAAAAAGGGGQQQQQQQQQCCCCCCGGGGNNNNNNNNQQQQQQQQQIIIIIIIIGGGGGGGGKKKKKKKKKFFFFFFFFFFFWWWWWWWWWWWWWWEEEEEEEEEVVVVVVVMMMMMMMMCCCCCCDDDDDDDDEEEEEEEEEHHHHHHHHHHGGGGIIIIIIIIDDDDDDDDAAAAATTTTTTTGGGGNNNNNNNNYYYYYYYYYYYYVVVVVVVGGGGNNNNNNNNFFFFFFFFFFFHHHHHHHHHHLLLLLLLLQQQQQQQQQLLLLLLLLEEEEEEEEERRRRRRRRRRRVVVVVVVNNNNNNNNVVVVVVVYYYYYYYYYYYYYYYYYYYYYYYYNNNNNNNNEEEEEEEEEAAAAASSSSSSGGGGGGGGRRRRRRRRRRRYYYYYYYYYYYYVVVVVVVPPPPPPPRRRRRRRRRRRAAAAAVVVVVVVLLLLLLLLMMMMMMMMDDDDDDDDLLLLLLLLEEEEEEEEEPPPPPPPGGGGTTTTTTTMMMMMMMMDDDDDDDDSSSSSSLLLLLLLLRRRRRRRRRRRSSSSSSGGGGPPPPPPPFFFFFFFFFFFGGGGKKKKKKKKKIIIIIIIIFFFFFFFFFFFRRRRRRRRRRRPPPPPPPDDDDDDDDNNNNNNNNFFFFFFFFFFFVVVVVVVFFFFFFFFFFFGGGGQQQQQQQQQNNNNNNNNGGGGAAAAAGGGGNNNNNNNNNNNNNNNNWWWWWWWWWWWWWWAAAAAKKKKKKKKKGGGGHHHHHHHHHHYYYYYYYYYYYYTTTTTTTEEEEEEEEEGGGGAAAAAEEEEEEEEELLLLLLLLIIIIIIIIDDDDDDDDSSSSSSVVVVVVVLLLLLLLLDDDDDDDDVVVVVVVVVVVVVVRRRRRRRRRRRKKKKKKKKKEEEEEEEEEAAAAAEEEEEEEEENNNNNNNNCCCCCCDDDDDDDDCCCCCCLLLLLLLLQQQQQQQQQGGGGFFFFFFFFFFFQQQQQQQQQIIIIIIIICCCCCCHHHHHHHHHHSSSSSSLLLLLLLLGGGGGGGGGGGGTTTTTTTGGGGSSSSSSGGGGMMMMMMMMGGGGTTTTTTTLLLLLLLLLLLLLLLLIIIIIIIISSSSSSKKKKKKKKKIIIIIIIIRRRRRRRRRRREEEEEEEEEEEEEEEEEEYYYYYYYYYYYYPPPPPPPDDDDDDDDRRRRRRRRRRRMMMMMMMMMMMMMMMMLLLLLLLLTTTTTTTFFFFFFFFFFFSSSSSSVVVVVVVFFFFFFFFFFFAAAAAVVVVVVVPPPPPPPEEEEEEEEEGGGGSSSSSSDDDDDDDDTTTTTTTVVVVVVVVVVVVVVEEEEEEEEEPPPPPPPYYYYYYYYYYYYNNNNNNNNAAAAATTTTTTTLLLLLLLLSSSSSSVVVVVVVHHHHHHHHHHQQQQQQQQQLLLLLLLLVVVVVVVEEEEEEEEENNNNNNNNAAAAADDDDDDDDEEEEEEEEECCCCCCMMMMMMMMVVVVVVVLLLLLLLLDDDDDDDDNNNNNNNNEEEEEEEEEAAAAALLLLLLLLYYYYYYYYYYYYDDDDDDDDIIIIIIIICCCCCCFFFFFFFFFFFRRRRRRRRRRRTTTTTTTLLLLLLLLKKKKKKKKKLLLLLLLLTTTTTTTNNNNNNNNPPPPPPPSSSSSSFFFFFFFFFFFGGGGDDDDDDDDLLLLLLLLNNNNNNNNHHHHHHHHHHLLLLLLLLIIIIIIIISSSSSSTTTTTTTTTTTTTTMMMMMMMMSSSSSSGGGGVVVVVVVTTTTTTTCCCCCCCCCCCCLLLLLLLLRRRRRRRRRRRFFFFFFFFFFFPPPPPPPGGGGQQQQQQQQQLLLLLLLLNNNNNNNNSSSSSSDDDDDDDDLLLLLLLLRRRRRRRRRRRKKKKKKKKKLLLLLLLLAAAAAVVVVVVVNNNNNNNNLLLLLLLLIIIIIIIIPPPPPPPFFFFFFFFFFFPPPPPPPRRRRRRRRRRRLLLLLLLLHHHHHHHHHHFFFFFFFFFFFFFFFFFFFFFFMMMMMMMMVVVVVVVGGGGFFFFFFFFFFFAAAAAPPPPPPPLLLLLLLLTTTTTTTSSSSSSRRRRRRRRRRRGGGGSSSSSSQQQQQQQQQQQQQQQQQQYYYYYYYYYYYYRRRRRRRRRRRSSSSSSLLLLLLLLTTTTTTTIIIIIIIIPPPPPPPEEEEEEEEELLLLLLLLTTTTTTTQQQQQQQQQQQQQQQQQQMMMMMMMMWWWWWWWWWWWWWWDDDDDDDDAAAAARRRRRRRRRRRNNNNNNNNMMMMMMMMMMMMMMMMCCCCCCAAAAAAAAAADDDDDDDDPPPPPPPRRRRRRRRRRRHHHHHHHHHHGGGGRRRRRRRRRRRYYYYYYYYYYYYLLLLLLLLTTTTTTTAAAAASSSSSSAAAAAMMMMMMMMFFFFFFFFFFFRRRRRRRRRRRGGGGKKKKKKKKKMMMMMMMMSSSSSSTTTTTTTKKKKKKKKKEEEEEEEEEVVVVVVVDDDDDDDDQQQQQQQQQQQQQQQQQQMMMMMMMMIIIIIIIINNNNNNNNVVVVVVVQQQQQQQQQNNNNNNNNKKKKKKKKKNNNNNNNNSSSSSSSSSSSSYYYYYYYYYYYYFFFFFFFFFFFVVVVVVVEEEEEEEEEWWWWWWWWWWWWWWIIIIIIIIPPPPPPPNNNNNNNNNNNNNNNNVVVVVVVKKKKKKKKKSSSSSSSSSSSSVVVVVVVCCCCCCDDDDDDDDIIIIIIIIPPPPPPPPPPPPPPTTTTTTTGGGGLLLLLLLLSSSSSSMMMMMMMMSSSSSSSSSSSSTTTTTTTFFFFFFFFFFFMMMMMMMMGGGGNNNNNNNNSSSSSSTTTTTTTSSSSSSIIIIIIIIQQQQQQQQQEEEEEEEEEMMMMMMMMFFFFFFFFFFFRRRRRRRRRRRRRRRRRRRRRRVVVVVVVSSSSSSEEEEEEEEEQQQQQQQQQFFFFFFFFFFFTTTTTTTVVVVVVVMMMMMMMMFFFFFFFFFFFKKKKKKKKKRRRRRRRRRRRKKKKKKKKKAAAAAFFFFFFFFFFFLLLLLLLLHHHHHHHHHHWWWWWWWWWWWWWWYYYYYYYYYYYYTTTTTTTGGGGEEEEEEEEEGGGGMMMMMMMMDDDDDDDDEEEEEEEEEMMMMMMMMEEEEEEEEEFFFFFFFFFFFTTTTTTTEEEEEEEEEVVVVVVVRRRRRRRRRRRAAAAANNNNNNNNMMMMMMMMNNNNNNNNDDDDDDDDLLLLLLLLVVVVVVVAAAAAEEEEEEEEEYYYYYYYYYYYYQQQQQQQQQQQQQQQQQQYYYYYYYYYYYYQQQQQQQQQDDDDDDDDAAAAATTTTTTTAAAAAVVVVVVVDDDDDDDDDDDDDDDDHHHHHHHHHHEEEEEEEEEDDDDDDDDEEEEEEEEEDDDDDDDDEEEEEEEEEDDDDDDDDEEEEEEEEEAAAAAMMMMMMMMAAAAAAAAAAA

SEQ ID NO: 134 - protein, 3478 aa, Trichoderma viride
MMMMMMMMRRRRRRRRRRREEEEEEEEEIIIIIIIIVVVVVVVSSSSSSVVVVVVVHHHHHHHHHHLLLLLLLLQQQQQQQQQTTTTTTTGGGGQQQQQQQQQCCCCCCGGGGNNNNNNNNQQQQQQQQQVVVVVVVGGGGSSSSSSAAAAAFFFFFFFFFFFWWWWWWWWWWWWWWQQQQQQQQQTTTTTTTIIIIIIIISSSSSSGGGGEEEEEEEEEHHHHHHHHHHGGGGLLLLLLLLDDDDDDDDSSSSSSSSSSSSGGGGVVVVVVVYYYYYYYYYYYYGGGGGGGGTTTTTTTSSSSSSDDDDDDDDQQQQQQQQQQQQQQQQQQLLLLLLLLDDDDDDDDRRRRRRRRRRRLLLLLLLLNNNNNNNNVVVVVVVYYYYYYYYYYYYFFFFFFFFFFFNNNNNNNNEEEEEEEEEAAAAASSSSSSNNNNNNNNNNNNNNNNKKKKKKKKKYYYYYYYYYYYYVVVVVVVPPPPPPPRRRRRRRRRRRAAAAAVVVVVVVLLLLLLLLVVVVVVVDDDDDDDDLLLLLLLLEEEEEEEEEPPPPPPPGGGGTTTTTTTMMMMMMMMDDDDDDDDAAAAAVVVVVVVRRRRRRRRRRRSSSSSSGGGGPPPPPPPFFFFFFFFFFFGGGGQQQQQQQQQLLLLLLLLFFFFFFFFFFFRRRRRRRRRRRPPPPPPPDDDDDDDDNNNNNNNNFFFFFFFFFFFVVVVVVVFFFFFFFFFFFGGGGQQQQQQQQQSSSSSSGGGGAAAAAGGGGNNNNNNNNNNNNNNNNWWWWWWWWWWWWWWAAAAAKKKKKKKKKGGGGHHHHHHHHHHYYYYYYYYYYYYTTTTTTTEEEEEEEEEGGGGAAAAAEEEEEEEEELLLLLLLLVVVVVVVDDDDDDDDQQQQQQQQQVVVVVVVLLLLLLLLDDDDDDDDVVVVVVVVVVVVVVRRRRRRRRRRRRRRRRRRRRRREEEEEEEEEAAAAAEEEEEEEEENNNNNNNNCCCCCCEEEEEEEEECCCCCCLLLLLLLLQQQQQQQQQGGGGFFFFFFFFFFFQQQQQQQQQIIIIIIIITTTTTTTHHHHHHHHHHSSSSSSLLLLLLLLGGGGGGGGGGGGTTTTTTTGGGGSSSSSSGGGGMMMMMMMMGGGGTTTTTTTLLLLLLLLLLLLLLLLIIIIIIIISSSSSSKKKKKKKKKIIIIIIIIRRRRRRRRRRREEEEEEEEEEEEEEEEEEFFFFFFFFFFFPPPPPPPDDDDDDDDRRRRRRRRRRRMMMMMMMMMMMMMMMMAAAAATTTTTTTFFFFFFFFFFFSSSSSSVVVVVVVVVVVVVVPPPPPPPSSSSSSPPPPPPPKKKKKKKKKVVVVVVVSSSSSSDDDDDDDDTTTTTTTVVVVVVVVVVVVVVEEEEEEEEEPPPPPPPYYYYYYYYYYYYNNNNNNNNAAAAATTTTTTTLLLLLLLLSSSSSSMMMMMMMMHHHHHHHHHHQQQQQQQQQLLLLLLLLVVVVVVVEEEEEEEEENNNNNNNNSSSSSSDDDDDDDDKKKKKKKKKTTTTTTTFFFFFFFFFFFCCCCCCIIIIIIIIDDDDDDDDNNNNNNNNEEEEEEEEEAAAAALLLLLLLLYYYYYYYYYYYYDDDDDDDDIIIIIIIICCCCCCMMMMMMMMRRRRRRRRRRRTTTTTTTLLLLLLLLKKKKKKKKKLLLLLLLLSSSSSSNNNNNNNNPPPPPPPSSSSSSYYYYYYYYYYYYGGGGDDDDDDDDLLLLLLLLNNNNNNNNHHHHHHHHHHLLLLLLLLVVVVVVVSSSSSSAAAAAVVVVVVVMMMMMMMMSSSSSSGGGGVVVVVVVSSSSSSTTTTTTTSSSSSSLLLLLLLLRRRRRRRRRRRFFFFFFFFFFFPPPPPPPGGGGQQQQQQQQQLLLLLLLLNNNNNNNNSSSSSSDDDDDDDDLLLLLLLLRRRRRRRRRRRKKKKKKKKKLLLLLLLLAAAAAVVVVVVVNNNNNNNNMMMMMMMMVVVVVVVPPPPPPPFFFFFFFFFFFPPPPPPPRRRRRRRRRRRLLLLLLLLHHHHHHHHHHFFFFFFFFFFFFFFFFFFFFFFMMMMMMMMVVVVVVVGGGGFFFFFFFFFFFAAAAAPPPPPPPLLLLLLLLTTTTTTTSSSSSSPPPPPPPGGGGAAAAAHHHHHHHHHHSSSSSSFFFFFFFFFFFRRRRRRRRRRRAAAAAVVVVVVVTTTTTTTVVVVVVVPPPPPPPEEEEEEEEELLLLLLLLTTTTTTTQQQQQQQQQQQQQQQQQQMMMMMMMMMMMMMMMMDDDDDDDDPPPPPPPKKKKKKKKKNNNNNNNNMMMMMMMMMMMMMMMMAAAAAAAAAASSSSSSDDDDDDDDFFFFFFFFFFFRRRRRRRRRRRNNNNNNNNGGGGRRRRRRRRRRRYYYYYYYYYYYYLLLLLLLLTTTTTTTCCCCCCSSSSSSTTTTTTTIIIIIIIIFFFFFFFFFFFRRRRRRRRRRRGGGGKKKKKKKKKVVVVVVVAAAAAMMMMMMMMKKKKKKKKKEEEEEEEEEVVVVVVVEEEEEEEEEDDDDDDDDQQQQQQQQQMMMMMMMMRRRRRRRRRRRTTTTTTTVVVVVVVQQQQQQQQQNNNNNNNNKKKKKKKKKNNNNNNNNSSSSSSAAAAAYYYYYYYYYYYYFFFFFFFFFFFVVVVVVVEEEEEEEEEWWWWWWWWWWWWWWIIIIIIIIPPPPPPPNNNNNNNNNNNNNNNNIIIIIIIIQQQQQQQQQTTTTTTTAAAAACCCCCCAAAAALLLLLLLLSSSSSSPPPPPPPPPPPPPPRRRRRRRRRRRGGGGLLLLLLLLKKKKKKKKKIIIIIIIISSSSSSSSSSSSTTTTTTTFFFFFFFFFFFVVVVVVVGGGGNNNNNNNNSSSSSSTTTTTTTAAAAAIIIIIIIIQQQQQQQQQEEEEEEEEEIIIIIIIIFFFFFFFFFFFRRRRRRRRRRRRRRRRRRRRRRVVVVVVVGGGGEEEEEEEEEQQQQQQQQQFFFFFFFFFFFSSSSSSAAAAAMMMMMMMMFFFFFFFFFFFRRRRRRRRRRRRRRRRRRRRRRQQQQQQQQQAAAAAFFFFFFFFFFFLLLLLLLLHHHHHHHHHHWWWWWWWWWWWWWWYYYYYYYYYYYYTTTTTTTSSSSSSEEEEEEEEEGGGGMMMMMMMMDDDDDDDDEEEEEEEEEMMMMMMMMEEEEEEEEEFFFFFFFFFFFTTTTTTTEEEEEEEEEAAAAAEEEEEEEEESSSSSSNNNNNNNNMMMMMMMMNNNNNNNNDDDDDDDDLLLLLLLLVVVVVVVSSSSSSEEEEEEEEEYYYYYYYYYYYYQQQQQQQQQQQQQQQQQQYYYYYYYYYYYYQQQQQQQQQDDDDDDDDAAAAASSSSSSAAAAADDDDDDDDDDDDDDDDGGGGEEEEEEEEEEEEEEEEEEYYYYYYYYYYYYEEEEEEEEEEEEEEEEEEDDDDDDDDAAAAAPPPPPPPMMMMMMMMEEEEEEEEEEEEEEEEEEE

SEQ ID NO: 135 - protein, 3479 aa, Volvox carteri
MMMMMMMMRRRRRRRRRRREEEEEEEEEIIIIIIIIVVVVVVVHHHHHHHHHHIIIIIIIIQQQQQQQQQGGGGGGGGQQQQQQQQQCCCCCCGGGGNNNNNNNNQQQQQQQQQIIIIIIIIGGGGAAAAAKKKKKKKKKFFFFFFFFFFFWWWWWWWWWWWWWWEEEEEEEEEVVVVVVVVVVVVVVSSSSSSDDDDDDDDEEEEEEEEEHHHHHHHHHHGGGGIIIIIIIIDDDDDDDDPPPPPPPTTTTTTTGGGGTTTTTTTYYYYYYYYYYYYHHHHHHHHHHGGGGDDDDDDDDSSSSSSDDDDDDDDLLLLLLLLQQQQQQQQQLLLLLLLLEEEEEEEEERRRRRRRRRRRIIIIIIIINNNNNNNNVVVVVVVYYYYYYYYYYYYFFFFFFFFFFFNNNNNNNNEEEEEEEEEAAAAATTTTTTTGGGGGGGGRRRRRRRRRRRYYYYYYYYYYYYVVVVVVVPPPPPPPRRRRRRRRRRRAAAAAIIIIIIIILLLLLLLLMMMMMMMMDDDDDDDDLLLLLLLLEEEEEEEEEPPPPPPPGGGGTTTTTTTMMMMMMMMDDDDDDDDSSSSSSVVVVVVVRRRRRRRRRRRSSSSSSGGGGPPPPPPPYYYYYYYYYYYYGGGGQQQQQQQQQIIIIIIIIFFFFFFFFFFFRRRRRRRRRRRPPPPPPPDDDDDDDDNNNNNNNNFFFFFFFFFFFVVVVVVVFFFFFFFFFFFGGGGQQQQQQQQQTTTTTTTGGGGAAAAAGGGGNNNNNNNNNNNNNNNNWWWWWWWWWWWWWWAAAAAKKKKKKKKKGGGGHHHHHHHHHHYYYYYYYYYYYYTTTTTTTEEEEEEEEEGGGGAAAAAEEEEEEEEELLLLLLLLIIIIIIIIDDDDDDDDSSSSSSVVVVVVVLLLLLLLLDDDDDDDDVVVVVVVVVVVVVVRRRRRRRRRRRKKKKKKKKKEEEEEEEEEAAAAAEEEEEEEEESSSSSSCCCCCCDDDDDDDDCCCCCCLLLLLLLLQQQQQQQQQGGGGFFFFFFFFFFFQQQQQQQQQVVVVVVVCCCCCCHHHHHHHHHHSSSSSSLLLLLLLLGGGGGGGGGGGGTTTTTTTGGGGSSSSSSGGGGMMMMMMMMGGGGTTTTTTTLLLLLLLLLLLLLLLLIIIIIIIISSSSSSKKKKKKKKKIIIIIIIIRRRRRRRRRRREEEEEEEEEEEEEEEEEEYYYYYYYYYYYYPPPPPPPDDDDDDDDRRRRRRRRRRRMMMMMMMMMMMMMMMMLLLLLLLLTTTTTTTFFFFFFFFFFFSSSSSSVVVVVVVVVVVVVVPPPPPPPSSSSSSPPPPPPPKKKKKKKKKVVVVVVVSSSSSSDDDDDDDDTTTTTTTVVVVVVVVVVVVVVEEEEEEEEEPPPPPPPYYYYYYYYYYYYNNNNNNNNAAAAATTTTTTTLLLLLLLLSSSSSSVVVVVVVHHHHHHHHHHQQQQQQQQQLLLLLLLLVVVVVVVEEEEEEEEENNNNNNNNAAAAADDDDDDDDEEEEEEEEECCCCCCMMMMMMMMVVVVVVVLLLLLLLLDDDDDDDDNNNNNNNNEEEEEEEEEAAAAALLLLLLLLYYYYYYYYYYYYDDDDDDDDIIIIIIIICCCCCCFFFFFFFFFFFRRRRRRRRRRRTTTTTTTLLLLLLLLKKKKKKKKKLLLLLLLLTTTTTTTTTTTTTTPPPPPPPTTTTTTTFFFFFFFFFFFGGGGDDDDDDDDLLLLLLLLNNNNNNNNHHHHHHHHHHLLLLLLLLIIIIIIIISSSSSSAAAAAVVVVVVVMMMMMMMMSSSSSSGGGGIIIIIIIITTTTTTTCCCCCCCCCCCCLLLLLLLLRRRRRRRRRRRFFFFFFFFFFFPPPPPPPGGGGQQQQQQQQQLLLLLLLLNNNNNNNNAAAAADDDDDDDDLLLLLLLLRRRRRRRRRRRKKKKKKKKKLLLLLLLLAAAAAVVVVVVVNNNNNNNNLLLLLLLLIIIIIIIIPPPPPPPFFFFFFFFFFFPPPPPPPRRRRRRRRRRRLLLLLLLLHHHHHHHHHHFFFFFFFFFFFFFFFFFFFFFFMMMMMMMMVVVVVVVGGGGFFFFFFFFFFFTTTTTTTPPPPPPPLLLLLLLLTTTTTTTSSSSSSRRRRRRRRRRRGGGGSSSSSSQQQQQQQQQQQQQQQQQQYYYYYYYYYYYYRRRRRRRRRRRAAAAALLLLLLLLTTTTTTTVVVVVVVPPPPPPPEEEEEEEEELLLLLLLLTTTTTTTQQQQQQQQQQQQQQQQQQMMMMMMMMWWWWWWWWWWWWWWDDDDDDDDAAAAAKKKKKKKKKNNNNNNNNMMMMMMMMMMMMMMMMCCCCCCAAAAAAAAAADDDDDDDDPPPPPPPRRRRRRRRRRRHHHHHHHHHHGGGGRRRRRRRRRRRYYYYYYYYYYYYLLLLLLLLTTTTTTTAAAAASSSSSSAAAAALLLLLLLLFFFFFFFFFFFRRRRRRRRRRRGGGGRRRRRRRRRRRMMMMMMMMSSSSSSTTTTTTTKKKKKKKKKEEEEEEEEEVVVVVVVDDDDDDDDEEEEEEEEEQQQQQQQQQMMMMMMMMLLLLLLLLNNNNNNNNVVVVVVVQQQQQQQQQNNNNNNNNKKKKKKKKKNNNNNNNNSSSSSSSSSSSSYYYYYYYYYYYYFFFFFFFFFFFVVVVVVVEEEEEEEEEWWWWWWWWWWWWWWIIIIIIIIPPPPPPPNNNNNNNNNNNNNNNNVVVVVVVKKKKKKKKKSSSSSSSSSSSSVVVVVVVCCCCCCDDDDDDDDIIIIIIIIPPPPPPPPPPPPPPKKKKKKKKKGGGGLLLLLLLLKKKKKKKKKMMMMMMMMSSSSSSAAAAATTTTTTTFFFFFFFFFFFIIIIIIIIGGGGNNNNNNNNSSSSSSTTTTTTTAAAAAIIIIIIIIQQQQQQQQQEEEEEEEEEMMMMMMMMFFFFFFFFFFFKKKKKKKKKRRRRRRRRRRRVVVVVVVSSSSSSEEEEEEEEEQQQQQQQQQFFFFFFFFFFFTTTTTTTAAAAAMMMMMMMMFFFFFFFFFFFRRRRRRRRRRRRRRRRRRRRRRKKKKKKKKKAAAAAFFFFFFFFFFFLLLLLLLLHHHHHHHHHHWWWWWWWWWWWWWWYYYYYYYYYYYYTTTTTTTGGGGEEEEEEEEEGGGGMMMMMMMMDDDDDDDDEEEEEEEEEMMMMMMMMEEEEEEEEEFFFFFFFFFFFTTTTTTTEEEEEEEEEAAAAAEEEEEEEEESSSSSSNNNNNNNNMMMMMMMMNNNNNNNNDDDDDDDDLLLLLLLLVVVVVVVSSSSSSEEEEEEEEEYYYYYYYYYYYYQQQQQQQQQQQQQQQQQQYYYYYYYYYYYYQQQQQQQQQDDDDDDDDAAAAASSSSSSAAAAAEEEEEEEEEEEEEEEEEEEEEEEEEEEGGGGEEEEEEEEEFFFFFFFFFFFEEEEEEEEEGGGGEEEEEEEEEEEEEEEEEEEEEEEEEEEEEEEEEEEENNNNNNNNN

SEQ ID NO: 136 - protein, 3509 aa, Triticum aestivum
MMMMMMMMRRRRRRRRRRREEEEEEEEEIIIIIIIILLLLLLLLHHHHHHHHHHIIIIIIIIQQQQQQQQQGGGGGGGGQQQQQQQQQCCCCCCGGGGNNNNNNNNQQQQQQQQQIIIIIIIIGGGGSSSSSSKKKKKKKKKFFFFFFFFFFFWWWWWWWWWWWWWWEEEEEEEEEVVVVVVVVVVVVVVCCCCCCDDDDDDDDEEEEEEEEEHHHHHHHHHHGGGGIIIIIIIIDDDDDDDDPPPPPPPTTTTTTTGGGGRRRRRRRRRRRYYYYYYYYYYYYVVVVVVVGGGGTTTTTTTSSSSSSDDDDDDDDLLLLLLLLQQQQQQQQQLLLLLLLLEEEEEEEEERRRRRRRRRRRVVVVVVVNNNNNNNNVVVVVVVYYYYYYYYYYYYYYYYYYYYYYYYNNNNNNNNEEEEEEEEEAAAAASSSSSSCCCCCCGGGGRRRRRRRRRRRFFFFFFFFFFFVVVVVVVPPPPPPPRRRRRRRRRRRAAAAAVVVVVVVLLLLLLLLMMMMMMMMDDDDDDDDLLLLLLLLEEEEEEEEEPPPPPPPGGGGTTTTTTTMMMMMMMMDDDDDDDDSSSSSSVVVVVVVRRRRRRRRRRRTTTTTTTGGGGPPPPPPPYYYYYYYYYYYYGGGGQQQQQQQQQIIIIIIIIFFFFFFFFFFFRRRRRRRRRRRPPPPPPPDDDDDDDDNNNNNNNNFFFFFFFFFFFVVVVVVVFFFFFFFFFFFGGGGQQQQQQQQQSSSSSSGGGGAAAAAGGGGNNNNNNNNNNNNNNNNWWWWWWWWWWWWWWAAAAAKKKKKKKKKGGGGHHHHHHHHHHYYYYYYYYYYYYTTTTTTTEEEEEEEEEGGGGAAAAAEEEEEEEEELLLLLLLLIIIIIIIIDDDDDDDDSSSSSSVVVVVVVLLLLLLLLDDDDDDDDVVVVVVVVVVVVVVRRRRRRRRRRRKKKKKKKKKEEEEEEEEEAAAAAEEEEEEEEENNNNNNNNCCCCCCDDDDDDDDCCCCCCLLLLLLLLQQQQQQQQQGGGGFFFFFFFFFFFQQQQQQQQQVVVVVVVCCCCCCHHHHHHHHHHSSSSSSLLLLLLLLGGGGGGGGGGGGTTTTTTTGGGGSSSSSSGGGGMMMMMMMMGGGGTTTTTTTLLLLLLLLLLLLLLLLIIIIIIIISSSSSSKKKKKKKKKIIIIIIIIRRRRRRRRRRREEEEEEEEEEEEEEEEEEYYYYYYYYYYYYPPPPPPPDDDDDDDDRRRRRRRRRRRMMMMMMMMMMMMMMMMLLLLLLLLTTTTTTTFFFFFFFFFFFSSSSSSVVVVVVVFFFFFFFFFFFPPPPPPPSSSSSSPPPPPPPKKKKKKKKKVVVVVVVSSSSSSDDDDDDDDTTTTTTTVVVVVVVVVVVVVVEEEEEEEEEPPPPPPPYYYYYYYYYYYYNNNNNNNNAAAAATTTTTTTLLLLLLLLSSSSSSVVVVVVVHHHHHHHHHHQQQQQQQQQLLLLLLLLVVVVVVVEEEEEEEEENNNNNNNNAAAAADDDDDDDDEEEEEEEEECCCCCCMMMMMMMMVVVVVVVLLLLLLLLDDDDDDDDNNNNNNNNEEEEEEEEEAAAAALLLLLLLLYYYYYYYYYYYYDDDDDDDDIIIIIIIICCCCCCFFFFFFFFFFFRRRRRRRRRRRTTTTTTTLLLLLLLLKKKKKKKKKLLLLLLLLTTTTTTTTTTTTTTPPPPPPPSSSSSSFFFFFFFFFFFGGGGDDDDDDDDLLLLLLLLNNNNNNNNHHHHHHHHHHLLLLLLLLIIIIIIIISSSSSSAAAAATTTTTTTMMMMMMMMSSSSSSGGGGVVVVVVVTTTTTTTCCCCCCCCCCCCLLLLLLLLRRRRRRRRRRRFFFFFFFFFFFPPPPPPPGGGGQQQQQQQQQLLLLLLLLNNNNNNNNSSSSSSDDDDDDDDLLLLLLLLRRRRRRRRRRRKKKKKKKKKLLLLLLLLAAAAAVVVVVVVNNNNNNNNLLLLLLLLIIIIIIIIPPPPPPPFFFFFFFFFFFPPPPPPPRRRRRRRRRRRLLLLLLLLHHHHHHHHHHFFFFFFFFFFFFFFFFFFFFFFMMMMMMMMVVVVVVVGGGGFFFFFFFFFFFAAAAAPPPPPPPLLLLLLLLTTTTTTTSSSSSSRRRRRRRRRRRGGGGSSSSSSQQQQQQQQQMMMMMMMMYYYYYYYYYYYYRRRRRRRRRRRPPPPPPPLLLLLLLLTTTTTTTVVVVVVVPPPPPPPEEEEEEEEELLLLLLLLTTTTTTTQQQQQQQQQQQQQQQQQQMMMMMMMMWWWWWWWWWWWWWWDDDDDDDDSSSSSSKKKKKKKKKNNNNNNNNMMMMMMMMMMMMMMMMCCCCCCAAAAAAAAAADDDDDDDDPPPPPPPRRRRRRRRRRRHHHHHHHHHHGGGGRRRRRRRRRRRYYYYYYYYYYYYLLLLLLLLTTTTTTTAAAAASSSSSSAAAAAMMMMMMMMFFFFFFFFFFFRRRRRRRRRRRGGGGKKKKKKKKKMMMMMMMMSSSSSSTTTTTTTKKKKKKKKKEEEEEEEEEVVVVVVVDDDDDDDDEEEEEEEEEQQQQQQQQQMMMMMMMMIIIIIIIINNNNNNNNVVVVVVVQQQQQQQQQNNNNNNNNKKKKKKKKKNNNNNNNNSSSSSSSSSSSSYYYYYYYYYYYYFFFFFFFFFFFVVVVVVVEEEEEEEEEWWWWWWWWWWWWWWIIIIIIIIPPPPPPPNNNNNNNNNNNNNNNNVVVVVVVKKKKKKKKKSSSSSSSSSSSSVVVVVVVCCCCCCDDDDDDDDIIIIIIIIPPPPPPPPPPPPPPRRRRRRRRRRRGGGGLLLLLLLLSSSSSSMMMMMMMMAAAAASSSSSSTTTTTTTFFFFFFFFFFFIIIIIIIIGGGGNNNNNNNNSSSSSSTTTTTTTSSSSSSIIIIIIIIQQQQQQQQQEEEEEEEEEMMMMMMMMFFFFFFFFFFFRRRRRRRRRRRRRRRRRRRRRRVVVVVVVSSSSSSEEEEEEEEEQQQQQQQQQFFFFFFFFFFFTTTTTTTAAAAAMMMMMMMMFFFFFFFFFFFRRRRRRRRRRRRRRRRRRRRRRKKKKKKKKKAAAAAFFFFFFFFFFFLLLLLLLLHHHHHHHHHHWWWWWWWWWWWWWWYYYYYYYYYYYYTTTTTTTGGGGEEEEEEEEEGGGGMMMMMMMMDDDDDDDDEEEEEEEEEMMMMMMMMEEEEEEEEEFFFFFFFFFFFTTTTTTTEEEEEEEEEAAAAAEEEEEEEEESSSSSSNNNNNNNNMMMMMMMMNNNNNNNNDDDDDDDDLLLLLLLLVVVVVVVSSSSSSEEEEEEEEEYYYYYYYYYYYYQQQQQQQQQQQQQQQQQQYYYYYYYYYYYYQQQQQQQQQDDDDDDDDAAAAATTTTTTTAAAAADDDDDDDDEEEEEEEEEEEEEEEEEEGGGGEEEEEEEEEYYYYYYYYYYYYEEEEEEEEEEEEEEEEEEEEEEEEEEEEEEEEEEEEEEEEEEEEELLLLLLLLEEEEEEEEEQQQQQQQQQEEEEEEEEEE

SEQ ID NO: 137 - protein, 3222 aa, Anemia phyllitidis
TTTTTTTGGGGTTTTTTTYYYYYYYYYYYYRRRRRRRRRRRGGGGDDDDDDDDSSSSSSEEEEEEEEETTTTTTTQQQQQQQQQLLLLLLLLEEEEEEEEERRRRRRRRRRRVVVVVVVNNNNNNNNVVVVVVVYYYYYYYYYYYYYYYYYYYYYYYYNNNNNNNNEEEEEEEEEAAAAASSSSSSCCCCCCGGGGRRRRRRRRRRRYYYYYYYYYYYYVVVVVVVPPPPPPPRRRRRRRRRRRAAAAAVVVVVVVLLLLLLLLMMMMMMMMDDDDDDDDLLLLLLLLEEEEEEEEEPPPPPPPGGGGTTTTTTTMMMMMMMMDDDDDDDDSSSSSSVVVVVVVRRRRRRRRRRRSSSSSSGGGGPPPPPPPYYYYYYYYYYYYGGGGQQQQQQQQQIIIIIIIIFFFFFFFFFFFRRRRRRRRRRRPPPPPPPDDDDDDDDNNNNNNNNFFFFFFFFFFFVVVVVVVFFFFFFFFFFFGGGGQQQQQQQQQSSSSSSGGGGAAAAAGGGGNNNNNNNNNNNNNNNNWWWWWWWWWWWWWWAAAAAKKKKKKKKKGGGGHHHHHHHHHHYYYYYYYYYYYYTTTTTTTEEEEEEEEEGGGGAAAAAEEEEEEEEELLLLLLLLIIIIIIIIDDDDDDDDSSSSSSVVVVVVVLLLLLLLLDDDDDDDDVVVVVVVVVVVVVVRRRRRRRRRRRKKKKKKKKKEEEEEEEEEAAAAAEEEEEEEEENNNNNNNNCCCCCCDDDDDDDDCCCCCCLLLLLLLLQQQQQQQQQGGGGFFFFFFFFFFFQQQQQQQQQVVVVVVVCCCCCCHHHHHHHHHHSSSSSSLLLLLLLLGGGGGGGGGGGGTTTTTTTGGGGSSSSSSGGGGMMMMMMMMGGGGTTTTTTTLLLLLLLLLLLLLLLLIIIIIIIISSSSSSKKKKKKKKKIIIIIIIIRRRRRRRRRRREEEEEEEEEEEEEEEEEEYYYYYYYYYYYYPPPPPPPDDDDDDDDRRRRRRRRRRRMMMMMMMMMMMMMMMMGGGGTTTTTTTFFFFFFFFFFFSSSSSSVVVVVVVFFFFFFFFFFFPPPPPPPSSSSSSPPPPPPPKKKKKKKKKVVVVVVVSSSSSSDDDDDDDDTTTTTTTVVVVVVVVVVVVVVEEEEEEEEEPPPPPPPYYYYYYYYYYYYNNNNNNNNAAAAATTTTTTTLLLLLLLLSSSSSSVVVVVVVHHHHHHHHHHQQQQQQQQQLLLLLLLLVVVVVVVEEEEEEEEENNNNNNNNAAAAADDDDDDDDEEEEEEEEECCCCCCMMMMMMMMVVVVVVVLLLLLLLLDDDDDDDDNNNNNNNNEEEEEEEEEAAAAALLLLLLLLYYYYYYYYYYYYDDDDDDDDIIIIIIIICCCCCCFFFFFFFFFFFRRRRRRRRRRRTTTTTTTLLLLLLLLKKKKKKKKKLLLLLLLLVVVVVVVTTTTTTTPPPPPPPTTTTTTTFFFFFFFFFFFGGGGDDDDDDDDLLLLLLLLNNNNNNNNHHHHHHHHHHLLLLLLLLIIIIIIIISSSSSSAAAAATTTTTTTMMMMMMMMSSSSSSGGGGVVVVVVVTTTTTTTCCCCCCCCCCCCLLLLLLLLRRRRRRRRRRRFFFFFFFFFFFPPPPPPPGGGGQQQQQQQQQLLLLLLLLNNNNNNNNSSSSSSDDDDDDDDLLLLLLLLRRRRRRRRRRRKKKKKKKKKLLLLLLLLAAAAAVVVVVVVNNNNNNNNLLLLLLLLIIIIIIIIPPPPPPPFFFFFFFFFFFPPPPPPPRRRRRRRRRRRLLLLLLLLHHHHHHHHHHFFFFFFFFFFFFFFFFFFFFFFMMMMMMMMVVVVVVVGGGGFFFFFFFFFFFAAAAAPPPPPPPLLLLLLLLTTTTTTTSSSSSSRRRRRRRRRRRGGGGSSSSSSQQQQQQQQQQQQQQQQQQYYYYYYYYYYYYRRRRRRRRRRRAAAAALLLLLLLLTTTTTTTVVVVVVVPPPPPPPEEEEEEEEELLLLLLLLTTTTTTTQQQQQQQQQQQQQQQQQQMMMMMMMMRRRRRRRRRRRDDDDDDDDAAAAAKKKKKKKKKNNNNNNNNMMMMMMMMMMMMMMMMCCCCCCAAAAAAAAAADDDDDDDDPPPPPPPRRRRRRRRRRRHHHHHHHHHHGGGGRRRRRRRRRRRYYYYYYYYYYYYLLLLLLLLTTTTTTTAAAAASSSSSSAAAAAMMMMMMMMFFFFFFFFFFFRRRRRRRRRRRGGGGKKKKKKKKKMMMMMMMMSSSSSSTTTTTTTKKKKKKKKKEEEEEEEEEVVVVVVVDDDDDDDDEEEEEEEEEQQQQQQQQQMMMMMMMMIIIIIIIINNNNNNNNVVVVVVVQQQQQQQQQNNNNNNNNKKKKKKKKKNNNNNNNNSSSSSSSSSSSSYYYYYYYYYYYYFFFFFFFFFFFVVVVVVVEEEEEEEEEWWWWWWWWWWWWWWIIIIIIIIPPPPPPPNNNNNNNNNNNNNNNNVVVVVVVKKKKKKKKKSSSSSSSSSSSSVVVVVVVCCCCCCDDDDDDDDIIIIIIIIPPPPPPPPPPPPPPVVVVVVVGGGGLLLLLLLLKKKKKKKKKMMMMMMMMAAAAACCCCCCTTTTTTTFFFFFFFFFFFIIIIIIIIGGGGNNNNNNNNSSSSSSTTTTTTTSSSSSSIIIIIIIIQQQQQQQQQEEEEEEEEEMMMMMMMMFFFFFFFFFFFRRRRRRRRRRRRRRRRRRRRRRVVVVVVVRRRRRRRRRRRDDDDDDDDQQQQQQQQQFFFFFFFFFFFTTTTTTTAAAAAMMMMMMMMFFFFFFFFFFFRRRRRRRRRRRGGGGKKKKKKKKKAAAAAFFFFFFFFFFFLLLLLLLLHHHHHHHHHHWWWWWWWWWWWWWWYYYYYYYYYYYYTTTTTTTGGGGEEEEEEEEEGGGGMMMMMMMMDDDDDDDDEEEEEEEEEMMMMMMMMEEEEEEEEEFFFFFFFFFFFTTTTTTTEEEEEEEEEAAAAAEEEEEEEEESSSSSSNNNNNNNNMMMMMMMMNNNNNNNNDDDDDDDDLLLLLLLLVVVVVVVSSSSSSEEEEEEEEEYYYYYYYYYYYYQQQQQQQQQQQQQQQQQQYYYYYYYYYYYYQQQQQQQQQDDDDDDDDAAAAATTTTTTTAAAAAEEEEEEEEEPPPPPPPEEEEEEEEEGGGGGGGGYYYYYYYYYYYYEEEEEEEEEEEEEEEEEEDDDDDDDDYYYYYYYYYYYYDDDDDDDDEEEEEEEEEAAAAAA

SEQ ID NO: 138 - protein, 3551 aa, Arabidopsis thaliana
MMMMMMMMRRRRRRRRRRREEEEEEEEEIIIIIIIILLLLLLLLHHHHHHHHHHIIIIIIIIQQQQQQQQQGGGGGGGGQQQQQQQQQCCCCCCGGGGNNNNNNNNQQQQQQQQQIIIIIIIIGGGGAAAAAKKKKKKKKKFFFFFFFFFFFWWWWWWWWWWWWWWEEEEEEEEEVVVVVVVVVVVVVVCCCCCCAAAAAEEEEEEEEEHHHHHHHHHHGGGGIIIIIIIIDDDDDDDDPPPPPPPTTTTTTTGGGGRRRRRRRRRRRYYYYYYYYYYYYTTTTTTTGGGGDDDDDDDDSSSSSSDDDDDDDDLLLLLLLLQQQQQQQQQLLLLLLLLEEEEEEEEERRRRRRRRRRRIIIIIIIINNNNNNNNVVVVVVVYYYYYYYYYYYYYYYYYYYYYYYYNNNNNNNNEEEEEEEEEAAAAASSSSSSCCCCCCGGGGRRRRRRRRRRRFFFFFFFFFFFVVVVVVVPPPPPPPRRRRRRRRRRRAAAAAVVVVVVVLLLLLLLLMMMMMMMMDDDDDDDDLLLLLLLLEEEEEEEEEPPPPPPPGGGGTTTTTTTMMMMMMMMDDDDDDDDSSSSSSLLLLLLLLRRRRRRRRRRRSSSSSSGGGGPPPPPPPYYYYYYYYYYYYGGGGQQQQQQQQQTTTTTTTFFFFFFFFFFFRRRRRRRRRRRPPPPPPPDDDDDDDDNNNNNNNNFFFFFFFFFFFVVVVVVVFFFFFFFFFFFGGGGQQQQQQQQQSSSSSSGGGGAAAAAGGGGNNNNNNNNNNNNNNNNWWWWWWWWWWWWWWAAAAAKKKKKKKKKGGGGHHHHHHHHHHYYYYYYYYYYYYTTTTTTTEEEEEEEEEGGGGAAAAAEEEEEEEEELLLLLLLLIIIIIIIIDDDDDDDDSSSSSSVVVVVVVLLLLLLLLDDDDDDDDVVVVVVVVVVVVVVRRRRRRRRRRRKKKKKKKKKEEEEEEEEEAAAAAEEEEEEEEENNNNNNNNCCCCCCDDDDDDDDCCCCCCLLLLLLLLQQQQQQQQQGGGGFFFFFFFFFFFQQQQQQQQQVVVVVVVCCCCCCHHHHHHHHHHSSSSSSLLLLLLLLGGGGGGGGGGGGTTTTTTTGGGGSSSSSSGGGGMMMMMMMMGGGGTTTTTTTLLLLLLLLLLLLLLLLIIIIIIIISSSSSSKKKKKKKKKIIIIIIIIRRRRRRRRRRREEEEEEEEEEEEEEEEEEYYYYYYYYYYYYPPPPPPPDDDDDDDDRRRRRRRRRRRMMMMMMMMMMMMMMMMLLLLLLLLTTTTTTTFFFFFFFFFFFSSSSSSVVVVVVVFFFFFFFFFFFPPPPPPPSSSSSSPPPPPPPKKKKKKKKKVVVVVVVSSSSSSDDDDDDDDTTTTTTTVVVVVVVVVVVVVVEEEEEEEEEPPPPPPPYYYYYYYYYYYYNNNNNNNNAAAAATTTTTTTLLLLLLLLSSSSSSVVVVVVVHHHHHHHHHHQQQQQQQQQLLLLLLLLVVVVVVVEEEEEEEEENNNNNNNNAAAAADDDDDDDDEEEEEEEEECCCCCCMMMMMMMMVVVVVVVLLLLLLLLDDDDDDDDNNNNNNNNEEEEEEEEEAAAAALLLLLLLLYYYYYYYYYYYYDDDDDDDDIIIIIIIICCCCCCFFFFFFFFFFFRRRRRRRRRRRTTTTTTTLLLLLLLLKKKKKKKKKLLLLLLLLTTTTTTTTTTTTTTPPPPPPPSSSSSSFFFFFFFFFFFGGGGDDDDDDDDLLLLLLLLNNNNNNNNHHHHHHHHHHLLLLLLLLIIIIIIIISSSSSSAAAAATTTTTTTMMMMMMMMSSSSSSGGGGVVVVVVVTTTTTTTCCCCCCCCCCCCLLLLLLLLRRRRRRRRRRRFFFFFFFFFFFPPPPPPPGGGGQQQQQQQQQLLLLLLLLNNNNNNNNSSSSSSDDDDDDDDLLLLLLLLRRRRRRRRRRRKKKKKKKKKLLLLLLLLAAAAAVVVVVVVNNNNNNNNLLLLLLLLIIIIIIIIPPPPPPPFFFFFFFFFFFPPPPPPPRRRRRRRRRRRLLLLLLLLHHHHHHHHHHFFFFFFFFFFFFFFFFFFFFFFMMMMMMMMVVVVVVVGGGGFFFFFFFFFFFAAAAAPPPPPPPLLLLLLLLTTTTTTTSSSSSSRRRRRRRRRRRGGGGSSSSSSQQQQQQQQQQQQQQQQQQYYYYYYYYYYYYRRRRRRRRRRRSSSSSSLLLLLLLLTTTTTTTVVVVVVVPPPPPPPEEEEEEEEELLLLLLLLTTTTTTTQQQQQQQQQQQQQQQQQQMMMMMMMMWWWWWWWWWWWWWWDDDDDDDDSSSSSSKKKKKKKKKNNNNNNNNMMMMMMMMMMMMMMMMCCCCCCAAAAAAAAAADDDDDDDDPPPPPPPRRRRRRRRRRRHHHHHHHHHHGGGGRRRRRRRRRRRYYYYYYYYYYYYLLLLLLLLTTTTTTTAAAAASSSSSSAAAAAMMMMMMMMFFFFFFFFFFFRRRRRRRRRRRGGGGKKKKKKKKKMMMMMMMMSSSSSSTTTTTTTKKKKKKKKKEEEEEEEEEVVVVVVVDDDDDDDDEEEEEEEEEQQQQQQQQQMMMMMMMMLLLLLLLLNNNNNNNNVVVVVVVQQQQQQQQQNNNNNNNNKKKKKKKKKNNNNNNNNSSSSSSSSSSSSYYYYYYYYYYYYFFFFFFFFFFFVVVVVVVEEEEEEEEEWWWWWWWWWWWWWWIIIIIIIIPPPPPPPNNNNNNNNNNNNNNNNVVVVVVVKKKKKKKKKSSSSSSTTTTTTTVVVVVVVCCCCCCDDDDDDDDIIIIIIIIPPPPPPPPPPPPPPTTTTTTTGGGGLLLLLLLLKKKKKKKKKMMMMMMMMAAAAASSSSSSTTTTTTTFFFFFFFFFFFIIIIIIIIGGGGNNNNNNNNSSSSSSTTTTTTTSSSSSSIIIIIIIIQQQQQQQQQEEEEEEEEEMMMMMMMMFFFFFFFFFFFRRRRRRRRRRRRRRRRRRRRRRVVVVVVVSSSSSSEEEEEEEEEQQQQQQQQQFFFFFFFFFFFTTTTTTTAAAAAMMMMMMMMFFFFFFFFFFFRRRRRRRRRRRRRRRRRRRRRRKKKKKKKKKAAAAAFFFFFFFFFFFLLLLLLLLHHHHHHHHHHWWWWWWWWWWWWWWYYYYYYYYYYYYTTTTTTTGGGGEEEEEEEEEGGGGMMMMMMMMDDDDDDDDEEEEEEEEEMMMMMMMMEEEEEEEEEFFFFFFFFFFFTTTTTTTEEEEEEEEEAAAAAEEEEEEEEESSSSSSNNNNNNNNMMMMMMMMNNNNNNNNDDDDDDDDLLLLLLLLVVVVVVVSSSSSSEEEEEEEEEYYYYYYYYYYYYQQQQQQQQQQQQQQQQQQYYYYYYYYYYYYQQQQQQQQQDDDDDDDDAAAAATTTTTTTAAAAADDDDDDDDEEEEEEEEEEEEEEEEEEGGGGDDDDDDDDYYYYYYYYYYYYEEEEEEEEEDDDDDDDDEEEEEEEEEEEEEEEEEEEEEEEEEEEGGGGEEEEEEEEEYYYYYYYYYYYYQQQQQQQQQQQQQQQQQQEEEEEEEEEEEEEEEEEEEEEEEEEEEYYYYYYYYYYYYY

SEQ ID NO: 139 - protein, 3531 aa, Caenorhabditis elegans
MMMMMMMMRRRRRRRRRRREEEEEEEEEIIIIIIIIVVVVVVVHHHHHHHHHHVVVVVVVQQQQQQQQQAAAAAGGGGQQQQQQQQQCCCCCCGGGGNNNNNNNNQQQQQQQQQIIIIIIIIGGGGSSSSSSKKKKKKKKKFFFFFFFFFFFWWWWWWWWWWWWWWEEEEEEEEEVVVVVVVIIIIIIIISSSSSSDDDDDDDDEEEEEEEEEHHHHHHHHHHGGGGIIIIIIIIQQQQQQQQQPPPPPPPDDDDDDDDGGGGTTTTTTTFFFFFFFFFFFKKKKKKKKKGGGGEEEEEEEEETTTTTTTDDDDDDDDLLLLLLLLQQQQQQQQQLLLLLLLLEEEEEEEEERRRRRRRRRRRIIIIIIIIDDDDDDDDVVVVVVVYYYYYYYYYYYYYYYYYYYYYYYYNNNNNNNNEEEEEEEEEAAAAANNNNNNNNNNNNNNNNGGGGKKKKKKKKKYYYYYYYYYYYYVVVVVVVPPPPPPPRRRRRRRRRRRAAAAAVVVVVVVLLLLLLLLVVVVVVVDDDDDDDDLLLLLLLLEEEEEEEEEPPPPPPPGGGGTTTTTTTMMMMMMMMDDDDDDDDSSSSSSVVVVVVVRRRRRRRRRRRSSSSSSGGGGPPPPPPPFFFFFFFFFFFGGGGQQQQQQQQQLLLLLLLLFFFFFFFFFFFRRRRRRRRRRRPPPPPPPDDDDDDDDNNNNNNNNFFFFFFFFFFFVVVVVVVFFFFFFFFFFFGGGGQQQQQQQQQSSSSSSGGGGAAAAAGGGGNNNNNNNNNNNNNNNNWWWWWWWWWWWWWWAAAAAKKKKKKKKKGGGGHHHHHHHHHHYYYYYYYYYYYYTTTTTTTEEEEEEEEEGGGGAAAAAEEEEEEEEELLLLLLLLVVVVVVVDDDDDDDDNNNNNNNNVVVVVVVLLLLLLLLDDDDDDDDVVVVVVVIIIIIIIIRRRRRRRRRRRKKKKKKKKKEEEEEEEEEAAAAAEEEEEEEEEGGGGCCCCCCDDDDDDDDCCCCCCLLLLLLLLQQQQQQQQQGGGGFFFFFFFFFFFQQQQQQQQQLLLLLLLLTTTTTTTHHHHHHHHHHSSSSSSLLLLLLLLGGGGGGGGGGGGTTTTTTTGGGGSSSSSSGGGGMMMMMMMMGGGGTTTTTTTLLLLLLLLLLLLLLLLIIIIIIIISSSSSSKKKKKKKKKIIIIIIIIRRRRRRRRRRREEEEEEEEEEEEEEEEEEYYYYYYYYYYYYPPPPPPPDDDDDDDDRRRRRRRRRRRIIIIIIIIMMMMMMMMSSSSSSSSSSSSFFFFFFFFFFFSSSSSSVVVVVVVVVVVVVVPPPPPPPSSSSSSPPPPPPPKKKKKKKKKVVVVVVVSSSSSSDDDDDDDDTTTTTTTVVVVVVVVVVVVVVEEEEEEEEEPPPPPPPYYYYYYYYYYYYNNNNNNNNAAAAATTTTTTTLLLLLLLLSSSSSSVVVVVVVHHHHHHHHHHQQQQQQQQQLLLLLLLLVVVVVVVEEEEEEEEENNNNNNNNTTTTTTTDDDDDDDDEEEEEEEEETTTTTTTYYYYYYYYYYYYCCCCCCIIIIIIIIDDDDDDDDNNNNNNNNEEEEEEEEEAAAAALLLLLLLLYYYYYYYYYYYYDDDDDDDDIIIIIIIICCCCCCYYYYYYYYYYYYRRRRRRRRRRRTTTTTTTLLLLLLLLKKKKKKKKKLLLLLLLLTTTTTTTNNNNNNNNPPPPPPPTTTTTTTYYYYYYYYYYYYGGGGDDDDDDDDLLLLLLLLNNNNNNNNHHHHHHHHHHLLLLLLLLVVVVVVVSSSSSSLLLLLLLLTTTTTTTMMMMMMMMSSSSSSGGGGVVVVVVVTTTTTTTTTTTTTTCCCCCCLLLLLLLLRRRRRRRRRRRFFFFFFFFFFFPPPPPPPGGGGQQQQQQQQQLLLLLLLLNNNNNNNNAAAAADDDDDDDDLLLLLLLLRRRRRRRRRRRKKKKKKKKKLLLLLLLLAAAAAVVVVVVVNNNNNNNNMMMMMMMMVVVVVVVPPPPPPPFFFFFFFFFFFPPPPPPPRRRRRRRRRRRLLLLLLLLHHHHHHHHHHFFFFFFFFFFFFFFFFFFFFFFMMMMMMMMPPPPPPPGGGGFFFFFFFFFFFAAAAAPPPPPPPLLLLLLLLSSSSSSAAAAAKKKKKKKKKGGGGTTTTTTTQQQQQQQQQAAAAAYYYYYYYYYYYYRRRRRRRRRRRAAAAALLLLLLLLTTTTTTTVVVVVVVAAAAAEEEEEEEEELLLLLLLLTTTTTTTQQQQQQQQQQQQQQQQQQMMMMMMMMFFFFFFFFFFFDDDDDDDDAAAAAKKKKKKKKKNNNNNNNNMMMMMMMMMMMMMMMMAAAAAAAAAACCCCCCDDDDDDDDPPPPPPPRRRRRRRRRRRHHHHHHHHHHGGGGRRRRRRRRRRRYYYYYYYYYYYYLLLLLLLLTTTTTTTVVVVVVVAAAAAAAAAAMMMMMMMMFFFFFFFFFFFRRRRRRRRRRRGGGGRRRRRRRRRRRMMMMMMMMSSSSSSMMMMMMMMRRRRRRRRRRREEEEEEEEEVVVVVVVDDDDDDDDEEEEEEEEEQQQQQQQQQMMMMMMMMLLLLLLLLNNNNNNNNVVVVVVVQQQQQQQQQNNNNNNNNKKKKKKKKKNNNNNNNNSSSSSSSSSSSSYYYYYYYYYYYYFFFFFFFFFFFVVVVVVVEEEEEEEEEWWWWWWWWWWWWWWIIIIIIIIPPPPPPPNNNNNNNNNNNNNNNNVVVVVVVKKKKKKKKKTTTTTTTAAAAAVVVVVVVCCCCCCDDDDDDDDIIIIIIIIPPPPPPPPPPPPPPRRRRRRRRRRRGGGGLLLLLLLLKKKKKKKKKMMMMMMMMAAAAAAAAAATTTTTTTFFFFFFFFFFFVVVVVVVGGGGNNNNNNNNSSSSSSTTTTTTTAAAAAIIIIIIIIQQQQQQQQQEEEEEEEEELLLLLLLLFFFFFFFFFFFKKKKKKKKKRRRRRRRRRRRIIIIIIIISSSSSSEEEEEEEEEQQQQQQQQQFFFFFFFFFFFTTTTTTTAAAAAMMMMMMMMFFFFFFFFFFFRRRRRRRRRRRRRRRRRRRRRRKKKKKKKKKAAAAAFFFFFFFFFFFLLLLLLLLHHHHHHHHHHWWWWWWWWWWWWWWYYYYYYYYYYYYTTTTTTTGGGGEEEEEEEEEGGGGMMMMMMMMDDDDDDDDEEEEEEEEEMMMMMMMMEEEEEEEEEFFFFFFFFFFFTTTTTTTEEEEEEEEEAAAAAEEEEEEEEESSSSSSNNNNNNNNMMMMMMMMNNNNNNNNDDDDDDDDLLLLLLLLIIIIIIIISSSSSSEEEEEEEEEYYYYYYYYYYYYQQQQQQQQQQQQQQQQQQYYYYYYYYYYYYQQQQQQQQQEEEEEEEEEAAAAATTTTTTTAAAAAEEEEEEEEEDDDDDDDDDDDDDDDDVVVVVVVDDDDDDDDGGGGYYYYYYYYYYYYAAAAAEEEEEEEEEGGGGEEEEEEEEEAAAAAGGGGEEEEEEEEETTTTTTTYYYYYYYYYYYYEEEEEEEEESSSSSSEEEEEEEEEQQQQQQQQQQ

SEQ ID NO: 140 - protein, 3503 aa, Gallus gallus
MMMMMMMMRRRRRRRRRRREEEEEEEEEIIIIIIIIVVVVVVVHHHHHHHHHHIIIIIIIIQQQQQQQQQAAAAAGGGGQQQQQQQQQCCCCCCGGGGNNNNNNNNQQQQQQQQQIIIIIIIIGGGGAAAAAKKKKKKKKKFFFFFFFFFFFWWWWWWWWWWWWWWEEEEEEEEEVVVVVVVIIIIIIIISSSSSSDDDDDDDDEEEEEEEEEHHHHHHHHHHGGGGIIIIIIIIDDDDDDDDPPPPPPPTTTTTTTGGGGSSSSSSYYYYYYYYYYYYHHHHHHHHHHGGGGDDDDDDDDSSSSSSDDDDDDDDLLLLLLLLQQQQQQQQQLLLLLLLLEEEEEEEEERRRRRRRRRRRIIIIIIIINNNNNNNNVVVVVVVYYYYYYYYYYYYYYYYYYYYYYYYNNNNNNNNEEEEEEEEEAAAAATTTTTTTGGGGNNNNNNNNKKKKKKKKKYYYYYYYYYYYYVVVVVVVPPPPPPPRRRRRRRRRRRAAAAAIIIIIIIILLLLLLLLVVVVVVVDDDDDDDDLLLLLLLLEEEEEEEEEPPPPPPPGGGGTTTTTTTMMMMMMMMDDDDDDDDSSSSSSVVVVVVVRRRRRRRRRRRSSSSSSGGGGPPPPPPPFFFFFFFFFFFGGGGQQQQQQQQQIIIIIIIIFFFFFFFFFFFRRRRRRRRRRRPPPPPPPDDDDDDDDNNNNNNNNFFFFFFFFFFFVVVVVVVFFFFFFFFFFFGGGGQQQQQQQQQSSSSSSGGGGAAAAAGGGGNNNNNNNNNNNNNNNNWWWWWWWWWWWWWWAAAAAKKKKKKKKKGGGGHHHHHHHHHHYYYYYYYYYYYYTTTTTTTEEEEEEEEEGGGGAAAAAEEEEEEEEELLLLLLLLVVVVVVVDDDDDDDDSSSSSSVVVVVVVLLLLLLLLDDDDDDDDVVVVVVVVVVVVVVRRRRRRRRRRRKKKKKKKKKEEEEEEEEESSSSSSEEEEEEEEESSSSSSCCCCCCDDDDDDDDCCCCCCLLLLLLLLQQQQQQQQQGGGGFFFFFFFFFFFQQQQQQQQQLLLLLLLLTTTTTTTHHHHHHHHHHSSSSSSLLLLLLLLGGGGGGGGGGGGTTTTTTTGGGGSSSSSSGGGGMMMMMMMMGGGGTTTTTTTLLLLLLLLLLLLLLLLIIIIIIIISSSSSSKKKKKKKKKIIIIIIIIRRRRRRRRRRREEEEEEEEEEEEEEEEEEYYYYYYYYYYYYPPPPPPPDDDDDDDDRRRRRRRRRRRIIIIIIIIMMMMMMMMNNNNNNNNTTTTTTTFFFFFFFFFFFSSSSSSVVVVVVVMMMMMMMMPPPPPPPSSSSSSPPPPPPPKKKKKKKKKVVVVVVVSSSSSSDDDDDDDDTTTTTTTVVVVVVVVVVVVVVEEEEEEEEEPPPPPPPYYYYYYYYYYYYNNNNNNNNAAAAATTTTTTTLLLLLLLLSSSSSSVVVVVVVHHHHHHHHHHQQQQQQQQQLLLLLLLLVVVVVVVEEEEEEEEENNNNNNNNTTTTTTTDDDDDDDDEEEEEEEEETTTTTTTYYYYYYYYYYYYCCCCCCIIIIIIIIDDDDDDDDNNNNNNNNEEEEEEEEEAAAAALLLLLLLLYYYYYYYYYYYYDDDDDDDDIIIIIIIICCCCCCFFFFFFFFFFFRRRRRRRRRRRTTTTTTTLLLLLLLLKKKKKKKKKLLLLLLLLTTTTTTTTTTTTTTPPPPPPPTTTTTTTYYYYYYYYYYYYGGGGDDDDDDDDLLLLLLLLNNNNNNNNHHHHHHHHHHLLLLLLLLVVVVVVVSSSSSSAAAAATTTTTTTMMMMMMMMSSSSSSGGGGVVVVVVVTTTTTTTTTTTTTTCCCCCCLLLLLLLLRRRRRRRRRRRFFFFFFFFFFFPPPPPPPGGGGQQQQQQQQQLLLLLLLLNNNNNNNNAAAAADDDDDDDDLLLLLLLLRRRRRRRRRRRKKKKKKKKKLLLLLLLLAAAAAVVVVVVVNNNNNNNNMMMMMMMMVVVVVVVPPPPPPPFFFFFFFFFFFPPPPPPPRRRRRRRRRRRLLLLLLLLHHHHHHHHHHFFFFFFFFFFFFFFFFFFFFFFMMMMMMMMPPPPPPPGGGGFFFFFFFFFFFAAAAAPPPPPPPLLLLLLLLTTTTTTTSSSSSSRRRRRRRRRRRGGGGSSSSSSQQQQQQQQQQQQQQQQQQYYYYYYYYYYYYRRRRRRRRRRRAAAAALLLLLLLLTTTTTTTVVVVVVVPPPPPPPEEEEEEEEELLLLLLLLTTTTTTTQQQQQQQQQQQQQQQQQQMMMMMMMMFFFFFFFFFFFDDDDDDDDSSSSSSKKKKKKKKKNNNNNNNNMMMMMMMMMMMMMMMMAAAAAAAAAACCCCCCDDDDDDDDPPPPPPPRRRRRRRRRRRHHHHHHHHHHGGGGRRRRRRRRRRRYYYYYYYYYYYYLLLLLLLLTTTTTTTVVVVVVVAAAAAAAAAAIIIIIIIIFFFFFFFFFFFRRRRRRRRRRRGGGGRRRRRRRRRRRMMMMMMMMSSSSSSMMMMMMMMKKKKKKKKKEEEEEEEEEVVVVVVVDDDDDDDDEEEEEEEEEQQQQQQQQQMMMMMMMMLLLLLLLLNNNNNNNNVVVVVVVQQQQQQQQQNNNNNNNNKKKKKKKKKNNNNNNNNSSSSSSSSSSSSYYYYYYYYYYYYFFFFFFFFFFFVVVVVVVEEEEEEEEEWWWWWWWWWWWWWWIIIIIIIIPPPPPPPNNNNNNNNNNNNNNNNVVVVVVVKKKKKKKKKTTTTTTTAAAAAVVVVVVVCCCCCCDDDDDDDDIIIIIIIIPPPPPPPPPPPPPPRRRRRRRRRRRGGGGLLLLLLLLKKKKKKKKKMMMMMMMMSSSSSSAAAAATTTTTTTFFFFFFFFFFFIIIIIIIIGGGGNNNNNNNNSSSSSSTTTTTTTAAAAAIIIIIIIIQQQQQQQQQEEEEEEEEELLLLLLLLFFFFFFFFFFFKKKKKKKKKRRRRRRRRRRRIIIIIIIISSSSSSEEEEEEEEEQQQQQQQQQFFFFFFFFFFFTTTTTTTAAAAAMMMMMMMMFFFFFFFFFFFRRRRRRRRRRRRRRRRRRRRRRKKKKKKKKKAAAAAFFFFFFFFFFFLLLLLLLLHHHHHHHHHHWWWWWWWWWWWWWWYYYYYYYYYYYYTTTTTTTGGGGEEEEEEEEEGGGGMMMMMMMMDDDDDDDDEEEEEEEEEMMMMMMMMEEEEEEEEEFFFFFFFFFFFTTTTTTTEEEEEEEEEAAAAAEEEEEEEEESSSSSSNNNNNNNNMMMMMMMMNNNNNNNNDDDDDDDDLLLLLLLLVVVVVVVSSSSSSEEEEEEEEEYYYYYYYYYYYYQQQQQQQQQQQQQQQQQQYYYYYYYYYYYYQQQQQQQQQDDDDDDDDAAAAATTTTTTTAAAAADDDDDDDDEEEEEEEEEQQQQQQQQQGGGGEEEEEEEEEFFFFFFFFFFFEEEEEEEEEEEEEEEEEEEEEEEEEEEGGGGEEEEEEEEEEEEEEEEEEDDDDDDDDEEEEEEEEEAAAAAA

SEQ ID NO: 141 - protein, 3495 aa, Glomerella cingulata
MMMMMMMMRRRRRRRRRRREEEEEEEEEIIIIIIIIVVVVVVVHHHHHHHHHHLLLLLLLLQQQQQQQQQTTTTTTTGGGGQQQQQQQQQCCCCCCGGGGNNNNNNNNQQQQQQQQQIIIIIIIIGGGGAAAAAAAAAAFFFFFFFFFFFWWWWWWWWWWWWWWQQQQQQQQQNNNNNNNNIIIIIIIISSSSSSGGGGEEEEEEEEEHHHHHHHHHHGGGGLLLLLLLLDDDDDDDDSSSSSSNNNNNNNNGGGGVVVVVVVYYYYYYYYYYYYNNNNNNNNGGGGTTTTTTTSSSSSSEEEEEEEEELLLLLLLLQQQQQQQQQLLLLLLLLEEEEEEEEERRRRRRRRRRRMMMMMMMMSSSSSSVVVVVVVYYYYYYYYYYYYFFFFFFFFFFFNNNNNNNNEEEEEEEEEAAAAASSSSSSGGGGNNNNNNNNKKKKKKKKKYYYYYYYYYYYYVVVVVVVPPPPPPPRRRRRRRRRRRAAAAAVVVVVVVLLLLLLLLVVVVVVVDDDDDDDDLLLLLLLLEEEEEEEEEPPPPPPPGGGGTTTTTTTMMMMMMMMDDDDDDDDAAAAAVVVVVVVRRRRRRRRRRRAAAAAGGGGPPPPPPPFFFFFFFFFFFGGGGQQQQQQQQQLLLLLLLLFFFFFFFFFFFRRRRRRRRRRRPPPPPPPDDDDDDDDNNNNNNNNFFFFFFFFFFFVVVVVVVFFFFFFFFFFFGGGGQQQQQQQQQSSSSSSGGGGAAAAAGGGGNNNNNNNNNNNNNNNNWWWWWWWWWWWWWWAAAAAKKKKKKKKKGGGGHHHHHHHHHHYYYYYYYYYYYYTTTTTTTEEEEEEEEEGGGGAAAAAEEEEEEEEELLLLLLLLVVVVVVVDDDDDDDDQQQQQQQQQVVVVVVVLLLLLLLLDDDDDDDDVVVVVVVVVVVVVVRRRRRRRRRRRRRRRRRRRRRREEEEEEEEEAAAAAEEEEEEEEEGGGGCCCCCCDDDDDDDDCCCCCCLLLLLLLLQQQQQQQQQGGGGFFFFFFFFFFFQQQQQQQQQIIIIIIIITTTTTTTHHHHHHHHHHSSSSSSLLLLLLLLGGGGGGGGGGGGTTTTTTTGGGGAAAAAGGGGMMMMMMMMGGGGTTTTTTTLLLLLLLLLLLLLLLLIIIIIIIISSSSSSKKKKKKKKKIIIIIIIIRRRRRRRRRRREEEEEEEEEEEEEEEEEEFFFFFFFFFFFPPPPPPPDDDDDDDDRRRRRRRRRRRMMMMMMMMMMMMMMMMAAAAATTTTTTTFFFFFFFFFFFSSSSSSVVVVVVVVVVVVVVPPPPPPPSSSSSSPPPPPPPKKKKKKKKKVVVVVVVSSSSSSDDDDDDDDTTTTTTTVVVVVVVVVVVVVVEEEEEEEEEPPPPPPPYYYYYYYYYYYYNNNNNNNNAAAAATTTTTTTLLLLLLLLSSSSSSVVVVVVVHHHHHHHHHHQQQQQQQQQLLLLLLLLVVVVVVVEEEEEEEEENNNNNNNNSSSSSSDDDDDDDDEEEEEEEEETTTTTTTFFFFFFFFFFFCCCCCCIIIIIIIIDDDDDDDDNNNNNNNNEEEEEEEEEAAAAALLLLLLLLYYYYYYYYYYYYDDDDDDDDIIIIIIIICCCCCCMMMMMMMMRRRRRRRRRRRTTTTTTTLLLLLLLLKKKKKKKKKLLLLLLLLSSSSSSNNNNNNNNPPPPPPPSSSSSSYYYYYYYYYYYYGGGGDDDDDDDDLLLLLLLLNNNNNNNNHHHHHHHHHHLLLLLLLLVVVVVVVSSSSSSAAAAAVVVVVVVMMMMMMMMSSSSSSGGGGVVVVVVVTTTTTTTTTTTTTTCCCCCCLLLLLLLLRRRRRRRRRRRFFFFFFFFFFFPPPPPPPGGGGQQQQQQQQQLLLLLLLLNNNNNNNNSSSSSSDDDDDDDDLLLLLLLLRRRRRRRRRRRKKKKKKKKKLLLLLLLLAAAAAVVVVVVVNNNNNNNNMMMMMMMMVVVVVVVPPPPPPPFFFFFFFFFFFPPPPPPPRRRRRRRRRRRLLLLLLLLHHHHHHHHHHFFFFFFFFFFFFFFFFFFFFFFMMMMMMMMVVVVVVVGGGGFFFFFFFFFFFAAAAAPPPPPPPLLLLLLLLTTTTTTTSSSSSSRRRRRRRRRRRGGGGAAAAAHHHHHHHHHHSSSSSSFFFFFFFFFFFRRRRRRRRRRRAAAAAVVVVVVVSSSSSSVVVVVVVPPPPPPPEEEEEEEEELLLLLLLLTTTTTTTQQQQQQQQQQQQQQQQQQMMMMMMMMFFFFFFFFFFFDDDDDDDDPPPPPPPKKKKKKKKKNNNNNNNNMMMMMMMMMMMMMMMMAAAAAAAAAASSSSSSDDDDDDDDFFFFFFFFFFFRRRRRRRRRRRNNNNNNNNGGGGRRRRRRRRRRRYYYYYYYYYYYYLLLLLLLLTTTTTTTCCCCCCSSSSSSAAAAAIIIIIIIIFFFFFFFFFFFRRRRRRRRRRRGGGGKKKKKKKKKVVVVVVVAAAAAMMMMMMMMKKKKKKKKKDDDDDDDDVVVVVVVEEEEEEEEEDDDDDDDDQQQQQQQQQMMMMMMMMRRRRRRRRRRRNNNNNNNNVVVVVVVQQQQQQQQQNNNNNNNNKKKKKKKKKNNNNNNNNSSSSSSSSSSSSYYYYYYYYYYYYFFFFFFFFFFFVVVVVVVEEEEEEEEEWWWWWWWWWWWWWWIIIIIIIIPPPPPPPNNNNNNNNNNNNNNNNVVVVVVVQQQQQQQQQTTTTTTTAAAAALLLLLLLLCCCCCCSSSSSSIIIIIIIIPPPPPPPPPPPPPPRRRRRRRRRRRGGGGLLLLLLLLKKKKKKKKKMMMMMMMMSSSSSSSSSSSSTTTTTTTFFFFFFFFFFFVVVVVVVGGGGNNNNNNNNAAAAATTTTTTTAAAAAIIIIIIIIQQQQQQQQQEEEEEEEEELLLLLLLLFFFFFFFFFFFKKKKKKKKKRRRRRRRRRRRVVVVVVVGGGGEEEEEEEEEQQQQQQQQQFFFFFFFFFFFTTTTTTTAAAAAMMMMMMMMFFFFFFFFFFFRRRRRRRRRRRRRRRRRRRRRRKKKKKKKKKAAAAAFFFFFFFFFFFLLLLLLLLHHHHHHHHHHWWWWWWWWWWWWWWYYYYYYYYYYYYTTTTTTTGGGGEEEEEEEEEGGGGMMMMMMMMDDDDDDDDEEEEEEEEEMMMMMMMMEEEEEEEEEFFFFFFFFFFFTTTTTTTEEEEEEEEEAAAAAEEEEEEEEESSSSSSNNNNNNNNMMMMMMMMNNNNNNNNDDDDDDDDLLLLLLLLVVVVVVVSSSSSSEEEEEEEEEYYYYYYYYYYYYQQQQQQQQQQQQQQQQQQYYYYYYYYYYYYQQQQQQQQQDDDDDDDDAAAAAGGGGVVVVVVVDDDDDDDDEEEEEEEEEEEEEEEEEEEEEEEEEEEEEEEEEEEEEEEEEEEEEYYYYYYYYYYYYEEEEEEEEEEEEEEEEEEEEEEEEEEEAAAAAPPPPPPPLLLLLLLLEEEEEEEEEEEEEEEEEEEEEEEEEEEVVVVVVVV

SEQ ID NO: 142 - protein, 3498 aa, Glomerella graminicola
MMMMMMMMRRRRRRRRRRREEEEEEEEEIIIIIIIIVVVVVVVHHHHHHHHHHLLLLLLLLQQQQQQQQQTTTTTTTGGGGQQQQQQQQQCCCCCCGGGGNNNNNNNNQQQQQQQQQIIIIIIIIGGGGAAAAAAAAAAFFFFFFFFFFFWWWWWWWWWWWWWWQQQQQQQQQNNNNNNNNIIIIIIIISSSSSSGGGGEEEEEEEEEHHHHHHHHHHGGGGLLLLLLLLDDDDDDDDSSSSSSNNNNNNNNGGGGVVVVVVVYYYYYYYYYYYYNNNNNNNNGGGGTTTTTTTSSSSSSEEEEEEEEELLLLLLLLQQQQQQQQQLLLLLLLLEEEEEEEEERRRRRRRRRRRMMMMMMMMSSSSSSVVVVVVVYYYYYYYYYYYYFFFFFFFFFFFNNNNNNNNEEEEEEEEEAAAAASSSSSSGGGGNNNNNNNNKKKKKKKKKYYYYYYYYYYYYVVVVVVVPPPPPPPRRRRRRRRRRRAAAAAVVVVVVVLLLLLLLLVVVVVVVDDDDDDDDLLLLLLLLEEEEEEEEEPPPPPPPGGGGTTTTTTTMMMMMMMMDDDDDDDDAAAAAVVVVVVVRRRRRRRRRRRAAAAAGGGGPPPPPPPFFFFFFFFFFFGGGGQQQQQQQQQLLLLLLLLFFFFFFFFFFFRRRRRRRRRRRPPPPPPPDDDDDDDDNNNNNNNNFFFFFFFFFFFVVVVVVVFFFFFFFFFFFGGGGQQQQQQQQQSSSSSSGGGGAAAAAGGGGNNNNNNNNNNNNNNNNWWWWWWWWWWWWWWAAAAAKKKKKKKKKGGGGHHHHHHHHHHYYYYYYYYYYYYTTTTTTTEEEEEEEEEGGGGAAAAAEEEEEEEEELLLLLLLLVVVVVVVDDDDDDDDQQQQQQQQQVVVVVVVLLLLLLLLDDDDDDDDVVVVVVVVVVVVVVRRRRRRRRRRRRRRRRRRRRRREEEEEEEEEAAAAAEEEEEEEEEGGGGCCCCCCDDDDDDDDCCCCCCLLLLLLLLQQQQQQQQQGGGGFFFFFFFFFFFQQQQQQQQQIIIIIIIITTTTTTTHHHHHHHHHHSSSSSSLLLLLLLLGGGGGGGGGGGGTTTTTTTGGGGAAAAAGGGGMMMMMMMMGGGGTTTTTTTLLLLLLLLLLLLLLLLIIIIIIIISSSSSSKKKKKKKKKIIIIIIIIRRRRRRRRRRREEEEEEEEEEEEEEEEEEFFFFFFFFFFFPPPPPPPDDDDDDDDRRRRRRRRRRRMMMMMMMMMMMMMMMMAAAAATTTTTTTFFFFFFFFFFFSSSSSSVVVVVVVVVVVVVVPPPPPPPSSSSSSPPPPPPPKKKKKKKKKVVVVVVVSSSSSSDDDDDDDDTTTTTTTVVVVVVVVVVVVVVEEEEEEEEEPPPPPPPYYYYYYYYYYYYNNNNNNNNAAAAATTTTTTTLLLLLLLLSSSSSSVVVVVVVHHHHHHHHHHQQQQQQQQQLLLLLLLLVVVVVVVEEEEEEEEENNNNNNNNSSSSSSDDDDDDDDEEEEEEEEETTTTTTTFFFFFFFFFFFCCCCCCIIIIIIIIDDDDDDDDNNNNNNNNEEEEEEEEEAAAAALLLLLLLLYYYYYYYYYYYYDDDDDDDDIIIIIIIICCCCCCMMMMMMMMRRRRRRRRRRRTTTTTTTLLLLLLLLKKKKKKKKKLLLLLLLLSSSSSSNNNNNNNNPPPPPPPSSSSSSYYYYYYYYYYYYGGGGDDDDDDDDLLLLLLLLNNNNNNNNHHHHHHHHHHLLLLLLLLVVVVVVVSSSSSSAAAAAVVVVVVVMMMMMMMMSSSSSSGGGGVVVVVVVTTTTTTTTTTTTTTCCCCCCLLLLLLLLRRRRRRRRRRRFFFFFFFFFFFPPPPPPPGGGGQQQQQQQQQLLLLLLLLNNNNNNNNSSSSSSDDDDDDDDLLLLLLLLRRRRRRRRRRRKKKKKKKKKLLLLLLLLAAAAAVVVVVVVNNNNNNNNMMMMMMMMVVVVVVVPPPPPPPFFFFFFFFFFFPPPPPPPRRRRRRRRRRRLLLLLLLLHHHHHHHHHHFFFFFFFFFFFFFFFFFFFFFFMMMMMMMMVVVVVVVGGGGFFFFFFFFFFFAAAAAPPPPPPPLLLLLLLLTTTTTTTSSSSSSRRRRRRRRRRRGGGGAAAAAHHHHHHHHHHSSSSSSFFFFFFFFFFFRRRRRRRRRRRAAAAAVVVVVVVSSSSSSVVVVVVVPPPPPPPEEEEEEEEELLLLLLLLTTTTTTTQQQQQQQQQQQQQQQQQQMMMMMMMMFFFFFFFFFFFDDDDDDDDPPPPPPPKKKKKKKKKNNNNNNNNMMMMMMMMMMMMMMMMAAAAAAAAAASSSSSSDDDDDDDDFFFFFFFFFFFRRRRRRRRRRRNNNNNNNNGGGGRRRRRRRRRRRYYYYYYYYYYYYLLLLLLLLTTTTTTTCCCCCCSSSSSSAAAAAIIIIIIIIFFFFFFFFFFFRRRRRRRRRRRGGGGKKKKKKKKKVVVVVVVAAAAAMMMMMMMMKKKKKKKKKDDDDDDDDVVVVVVVEEEEEEEEEDDDDDDDDQQQQQQQQQMMMMMMMMRRRRRRRRRRRNNNNNNNNVVVVVVVLLLLLLLLNNNNNNNNKKKKKKKKKNNNNNNNNSSSSSSSSSSSSYYYYYYYYYYYYFFFFFFFFFFFVVVVVVVEEEEEEEEEWWWWWWWWWWWWWWIIIIIIIIPPPPPPPNNNNNNNNNNNNNNNNVVVVVVVQQQQQQQQQTTTTTTTAAAAALLLLLLLLCCCCCCSSSSSSIIIIIIIIPPPPPPPPPPPPPPRRRRRRRRRRRGGGGLLLLLLLLKKKKKKKKKMMMMMMMMSSSSSSFFFFFFFFFFFTTTTTTTFFFFFFFFFFFVVVVVVVGGGGNNNNNNNNSSSSSSTTTTTTTAAAAAIIIIIIIIQQQQQQQQQEEEEEEEEELLLLLLLLFFFFFFFFFFFKKKKKKKKKRRRRRRRRRRRVVVVVVVGGGGEEEEEEEEEQQQQQQQQQFFFFFFFFFFFTTTTTTTAAAAAMMMMMMMMFFFFFFFFFFFRRRRRRRRRRRRRRRRRRRRRRKKKKKKKKKAAAAAFFFFFFFFFFFLLLLLLLLHHHHHHHHHHWWWWWWWWWWWWWWYYYYYYYYYYYYTTTTTTTGGGGEEEEEEEEEGGGGMMMMMMMMDDDDDDDDEEEEEEEEEMMMMMMMMEEEEEEEEEFFFFFFFFFFFTTTTTTTEEEEEEEEEAAAAAEEEEEEEEESSSSSSNNNNNNNNMMMMMMMMNNNNNNNNDDDDDDDDLLLLLLLLVVVVVVVSSSSSSEEEEEEEEEYYYYYYYYYYYYQQQQQQQQQQQQQQQQQQYYYYYYYYYYYYQQQQQQQQQDDDDDDDDAAAAAGGGGVVVVVVVDDDDDDDDEEEEEEEEEEEEEEEEEEEEEEEEEEEEEEEEEEEEEEEEEEEEEYYYYYYYYYYYYEEEEEEEEEDDDDDDDDDDDDDDDDAAAAAPPPPPPPLLLLLLLLEEEEEEEEEEEEEEEEEEEEEEEEEEEVVVVVVVV

SEQ ID NO: 143 - protein, 3470 aa, Daucus carota
MMMMMMMMRRRRRRRRRRREEEEEEEEEIIIIIIIILLLLLLLLHHHHHHHHHHIIIIIIIIQQQQQQQQQGGGGGGGGQQQQQQQQQCCCCCCGGGGNNNNNNNNQQQQQQQQQIIIIIIIIGGGGSSSSSSKKKKKKKKKFFFFFFFFFFFWWWWWWWWWWWWWWEEEEEEEEEVVVVVVVVVVVVVVCCCCCCDDDDDDDDEEEEEEEEEHHHHHHHHHHGGGGIIIIIIIIDDDDDDDDPPPPPPPTTTTTTTGGGGQQQQQQQQQVVVVVVVLLLLLLLLSSSSSSEEEEEEEEESSSSSSDDDDDDDDLLLLLLLLQQQQQQQQQLLLLLLLLDDDDDDDDRRRRRRRRRRRIIIIIIIINNNNNNNNVVVVVVVYYYYYYYYYYYYYYYYYYYYYYYYNNNNNNNNEEEEEEEEEAAAAASSSSSSGGGGGGGGRRRRRRRRRRRYYYYYYYYYYYYVVVVVVVPPPPPPPRRRRRRRRRRRAAAAAVVVVVVVLLLLLLLLMMMMMMMMDDDDDDDDLLLLLLLLEEEEEEEEEPPPPPPPGGGGTTTTTTTMMMMMMMMDDDDDDDDSSSSSSVVVVVVVKKKKKKKKKTTTTTTTGGGGPPPPPPPHHHHHHHHHHGGGGQQQQQQQQQIIIIIIIIFFFFFFFFFFFRRRRRRRRRRRPPPPPPPDDDDDDDDNNNNNNNNFFFFFFFFFFFIIIIIIIIFFFFFFFFFFFGGGGQQQQQQQQQSSSSSSGGGGAAAAAGGGGNNNNNNNNNNNNNNNNWWWWWWWWWWWWWWAAAAAKKKKKKKKKGGGGHHHHHHHHHHYYYYYYYYYYYYTTTTTTTEEEEEEEEEGGGGAAAAAEEEEEEEEELLLLLLLLIIIIIIIIDDDDDDDDSSSSSSVVVVVVVLLLLLLLLDDDDDDDDVVVVVVVVVVVVVVRRRRRRRRRRRKKKKKKKKKEEEEEEEEEAAAAAEEEEEEEEENNNNNNNNCCCCCCEEEEEEEEECCCCCCLLLLLLLLQQQQQQQQQGGGGFFFFFFFFFFFQQQQQQQQQVVVVVVVCCCCCCHHHHHHHHHHSSSSSSLLLLLLLLGGGGGGGGGGGGTTTTTTTGGGGSSSSSSGGGGMMMMMMMMGGGGTTTTTTTLLLLLLLLLLLLLLLLIIIIIIIISSSSSSKKKKKKKKKIIIIIIIIRRRRRRRRRRREEEEEEEEEEEEEEEEEEYYYYYYYYYYYYPPPPPPPDDDDDDDDRRRRRRRRRRRMMMMMMMMMMMMMMMMLLLLLLLLTTTTTTTFFFFFFFFFFFSSSSSSVVVVVVVFFFFFFFFFFFPPPPPPPSSSSSSPPPPPPPKKKKKKKKKVVVVVVVSSSSSSDDDDDDDDTTTTTTTVVVVVVVVVVVVVVEEEEEEEEEPPPPPPPYYYYYYYYYYYYNNNNNNNNAAAAATTTTTTTLLLLLLLLSSSSSSGGGGHHHHHHHHHHQQQQQQQQQLLLLLLLLVVVVVVVEEEEEEEEENNNNNNNNAAAAADDDDDDDDEEEEEEEEECCCCCCMMMMMMMMVVVVVVVLLLLLLLLDDDDDDDDNNNNNNNNEEEEEEEEEAAAAALLLLLLLLYYYYYYYYYYYYDDDDDDDDIIIIIIIICCCCCCFFFFFFFFFFFRRRRRRRRRRRTTTTTTTLLLLLLLLKKKKKKKKKLLLLLLLLSSSSSSTTTTTTTPPPPPPPSSSSSSFFFFFFFFFFFGGGGDDDDDDDDLLLLLLLLNNNNNNNNHHHHHHHHHHLLLLLLLLIIIIIIIISSSSSSGGGGTTTTTTTMMMMMMMMSSSSSSGGGGVVVVVVVTTTTTTTCCCCCCCCCCCCLLLLLLLLRRRRRRRRRRRFFFFFFFFFFFPPPPPPPGGGGQQQQQQQQQLLLLLLLLNNNNNNNNSSSSSSDDDDDDDDLLLLLLLLRRRRRRRRRRRKKKKKKKKKLLLLLLLLAAAAAVVVVVVVNNNNNNNNLLLLLLLLIIIIIIIIPPPPPPPFFFFFFFFFFFPPPPPPPRRRRRRRRRRRLLLLLLLLHHHHHHHHHHFFFFFFFFFFFFFFFFFFFFFFMMMMMMMMVVVVVVVGGGGFFFFFFFFFFFAAAAAPPPPPPPLLLLLLLLTTTTTTTSSSSSSRRRRRRRRRRRGGGGSSSSSSQQQQQQQQQQQQQQQQQQYYYYYYYYYYYYRRRRRRRRRRRTTTTTTTLLLLLLLLTTTTTTTVVVVVVVPPPPPPPEEEEEEEEELLLLLLLLTTTTTTTQQQQQQQQQQQQQQQQQQMMMMMMMMWWWWWWWWWWWWWWDDDDDDDDSSSSSSKKKKKKKKKNNNNNNNNMMMMMMMMMMMMMMMMCCCCCCAAAAAAAAAADDDDDDDDPPPPPPPRRRRRRRRRRRHHHHHHHHHHGGGGRRRRRRRRRRRYYYYYYYYYYYYLLLLLLLLTTTTTTTAAAAASSSSSSAAAAAMMMMMMMMFFFFFFFFFFFRRRRRRRRRRRGGGGKKKKKKKKKMMMMMMMMSSSSSSTTTTTTTKKKKKKKKKEEEEEEEEEVVVVVVVDDDDDDDDEEEEEEEEEQQQQQQQQQIIIIIIIILLLLLLLLNNNNNNNNVVVVVVVQQQQQQQQQNNNNNNNNKKKKKKKKKNNNNNNNNSSSSSSSSSSSSYYYYYYYYYYYYFFFFFFFFFFFVVVVVVVEEEEEEEEEWWWWWWWWWWWWWWIIIIIIIIPPPPPPPNNNNNNNNNNNNNNNNVVVVVVVKKKKKKKKKSSSSSSSSSSSSVVVVVVVCCCCCCDDDDDDDDIIIIIIIIPPPPPPPPPPPPPPRRRRRRRRRRRGGGGLLLLLLLLSSSSSSMMMMMMMMSSSSSSSSSSSSTTTTTTTFFFFFFFFFFFIIIIIIIIGGGGNNNNNNNNSSSSSSTTTTTTTSSSSSSIIIIIIIIQQQQQQQQQEEEEEEEEEMMMMMMMMFFFFFFFFFFFRRRRRRRRRRRRRRRRRRRRRRVVVVVVVSSSSSSEEEEEEEEEQQQQQQQQQFFFFFFFFFFFTTTTTTTAAAAAMMMMMMMMFFFFFFFFFFFRRRRRRRRRRRPPPPPPPKKKKKKKKKAAAAAFFFFFFFFFFFLLLLLLLLHHHHHHHHHHWWWWWWWWWWWWWWYYYYYYYYYYYYTTTTTTTGGGGEEEEEEEEEGGGGMMMMMMMMDDDDDDDDEEEEEEEEEMMMMMMMMEEEEEEEEEFFFFFFFFFFFTTTTTTTEEEEEEEEEAAAAAEEEEEEEEESSSSSSNNNNNNNNMMMMMMMMNNNNNNNNDDDDDDDDLLLLLLLLVVVVVVVSSSSSSEEEEEEEEEYYYYYYYYYYYYQQQQQQQQQQQQQQQQQQYYYYYYYYYYYYQQQQQQQQQDDDDDDDDAAAAATTTTTTTAAAAAEEEEEEEEEEEEEEEEEEDDDDDDDDDDDDDDDDYYYYYYYYYYYYDDDDDDDDDDDDDDDDGGGGEEEEEEEEEGGGGSSSSSSTTTTTTTGGGGDDDDDDDDD

SEQ ID NO: 144 - protein, 3502 aa, Drosophila erecta
MMMMMMMMRRRRRRRRRRREEEEEEEEEIIIIIIIIVVVVVVVHHHHHHHHHHIIIIIIIIQQQQQQQQQAAAAAGGGGQQQQQQQQQCCCCCCGGGGNNNNNNNNQQQQQQQQQIIIIIIIIGGGGGGGGKKKKKKKKKFFFFFFFFFFFWWWWWWWWWWWWWWEEEEEEEEEVVVVVVVIIIIIIIISSSSSSDDDDDDDDEEEEEEEEEHHHHHHHHHHCCCCCCIIIIIIIIDDDDDDDDAAAAATTTTTTTGGGGTTTTTTTYYYYYYYYYYYYYYYYYYYYYYYYGGGGDDDDDDDDSSSSSSDDDDDDDDLLLLLLLLQQQQQQQQQLLLLLLLLEEEEEEEEERRRRRRRRRRRIIIIIIIINNNNNNNNVVVVVVVYYYYYYYYYYYYYYYYYYYYYYYYNNNNNNNNEEEEEEEEEAAAAATTTTTTTGGGGAAAAAKKKKKKKKKYYYYYYYYYYYYVVVVVVVPPPPPPPRRRRRRRRRRRAAAAAIIIIIIIILLLLLLLLVVVVVVVDDDDDDDDLLLLLLLLEEEEEEEEEPPPPPPPGGGGTTTTTTTMMMMMMMMDDDDDDDDSSSSSSVVVVVVVRRRRRRRRRRRSSSSSSGGGGRRRRRRRRRRRFFFFFFFFFFFGGGGQQQQQQQQQIIIIIIIIFFFFFFFFFFFRRRRRRRRRRRPPPPPPPDDDDDDDDNNNNNNNNFFFFFFFFFFFVVVVVVVFFFFFFFFFFFGGGGQQQQQQQQQSSSSSSGGGGAAAAAGGGGNNNNNNNNNNNNNNNNWWWWWWWWWWWWWWAAAAAKKKKKKKKKGGGGHHHHHHHHHHYYYYYYYYYYYYTTTTTTTEEEEEEEEEGGGGAAAAAEEEEEEEEELLLLLLLLVVVVVVVDDDDDDDDSSSSSSVVVVVVVLLLLLLLLDDDDDDDDVVVVVVVVVVVVVVRRRRRRRRRRRKKKKKKKKKEEEEEEEEESSSSSSEEEEEEEEEGGGGCCCCCCDDDDDDDDCCCCCCLLLLLLLLQQQQQQQQQGGGGFFFFFFFFFFFQQQQQQQQQLLLLLLLLTTTTTTTHHHHHHHHHHSSSSSSLLLLLLLLGGGGGGGGGGGGTTTTTTTGGGGSSSSSSGGGGMMMMMMMMGGGGTTTTTTTLLLLLLLLLLLLLLLLIIIIIIIISSSSSSKKKKKKKKKIIIIIIIIRRRRRRRRRRREEEEEEEEEEEEEEEEEEYYYYYYYYYYYYPPPPPPPDDDDDDDDRRRRRRRRRRRIIIIIIIIMMMMMMMMNNNNNNNNTTTTTTTFFFFFFFFFFFSSSSSSVVVVVVVVVVVVVVPPPPPPPSSSSSSPPPPPPPKKKKKKKKKVVVVVVVSSSSSSDDDDDDDDTTTTTTTVVVVVVVVVVVVVVEEEEEEEEEPPPPPPPYYYYYYYYYYYYNNNNNNNNAAAAATTTTTTTLLLLLLLLSSSSSSVVVVVVVHHHHHHHHHHQQQQQQQQQLLLLLLLLVVVVVVVEEEEEEEEENNNNNNNNTTTTTTTDDDDDDDDEEEEEEEEETTTTTTTYYYYYYYYYYYYCCCCCCIIIIIIIIDDDDDDDDNNNNNNNNEEEEEEEEEAAAAALLLLLLLLYYYYYYYYYYYYDDDDDDDDIIIIIIIICCCCCCFFFFFFFFFFFRRRRRRRRRRRTTTTTTTLLLLLLLLKKKKKKKKKLLLLLLLLTTTTTTTTTTTTTTPPPPPPPTTTTTTTYYYYYYYYYYYYGGGGDDDDDDDDLLLLLLLLNNNNNNNNHHHHHHHHHHLLLLLLLLVVVVVVVSSSSSSAAAAATTTTTTTMMMMMMMMSSSSSSGGGGVVVVVVVTTTTTTTTTTTTTTCCCCCCLLLLLLLLRRRRRRRRRRRFFFFFFFFFFFPPPPPPPGGGGQQQQQQQQQLLLLLLLLNNNNNNNNAAAAADDDDDDDDLLLLLLLLRRRRRRRRRRRKKKKKKKKKLLLLLLLLAAAAAVVVVVVVNNNNNNNNMMMMMMMMVVVVVVVPPPPPPPFFFFFFFFFFFPPPPPPPRRRRRRRRRRRLLLLLLLLHHHHHHHHHHFFFFFFFFFFFFFFFFFFFFFFMMMMMMMMPPPPPPPGGGGFFFFFFFFFFFAAAAAPPPPPPPLLLLLLLLTTTTTTTSSSSSSRRRRRRRRRRRGGGGSSSSSSQQQQQQQQQQQQQQQQQQYYYYYYYYYYYYRRRRRRRRRRRAAAAALLLLLLLLTTTTTTTVVVVVVVPPPPPPPEEEEEEEEELLLLLLLLTTTTTTTQQQQQQQQQQQQQQQQQQMMMMMMMMFFFFFFFFFFFDDDDDDDDAAAAAKKKKKKKKKNNNNNNNNMMMMMMMMMMMMMMMMAAAAAAAAAACCCCCCDDDDDDDDPPPPPPPRRRRRRRRRRRHHHHHHHHHHGGGGRRRRRRRRRRRYYYYYYYYYYYYLLLLLLLLTTTTTTTVVVVVVVAAAAAAAAAAIIIIIIIIFFFFFFFFFFFRRRRRRRRRRRGGGGRRRRRRRRRRRMMMMMMMMSSSSSSMMMMMMMMKKKKKKKKKEEEEEEEEEVVVVVVVDDDDDDDDEEEEEEEEEQQQQQQQQQMMMMMMMMLLLLLLLLNNNNNNNNIIIIIIIIQQQQQQQQQNNNNNNNNKKKKKKKKKNNNNNNNNSSSSSSSSSSSSFFFFFFFFFFFFFFFFFFFFFFVVVVVVVEEEEEEEEEWWWWWWWWWWWWWWIIIIIIIIPPPPPPPNNNNNNNNNNNNNNNNCCCCCCKKKKKKKKKTTTTTTTAAAAAVVVVVVVCCCCCCDDDDDDDDIIIIIIIIPPPPPPPPPPPPPPRRRRRRRRRRRGGGGLLLLLLLLKKKKKKKKKMMMMMMMMSSSSSSAAAAATTTTTTTFFFFFFFFFFFIIIIIIIIGGGGNNNNNNNNSSSSSSTTTTTTTAAAAAIIIIIIIIQQQQQQQQQEEEEEEEEELLLLLLLLFFFFFFFFFFFKKKKKKKKKRRRRRRRRRRRVVVVVVVSSSSSSEEEEEEEEEQQQQQQQQQFFFFFFFFFFFTTTTTTTAAAAAMMMMMMMMFFFFFFFFFFFRRRRRRRRRRRRRRRRRRRRRRKKKKKKKKKAAAAAFFFFFFFFFFFLLLLLLLLHHHHHHHHHHWWWWWWWWWWWWWWYYYYYYYYYYYYTTTTTTTGGGGEEEEEEEEEGGGGMMMMMMMMDDDDDDDDEEEEEEEEEMMMMMMMMEEEEEEEEEFFFFFFFFFFFTTTTTTTEEEEEEEEEAAAAAEEEEEEEEESSSSSSNNNNNNNNMMMMMMMMNNNNNNNNDDDDDDDDLLLLLLLLVVVVVVVSSSSSSEEEEEEEEEYYYYYYYYYYYYQQQQQQQQQQQQQQQQQQYYYYYYYYYYYYQQQQQQQQQEEEEEEEEEAAAAATTTTTTTAAAAADDDDDDDDEEEEEEEEEEEEEEEEEEGGGGEEEEEEEEEFFFFFFFFFFFDDDDDDDDEEEEEEEEEDDDDDDDDEEEEEEEEEEEEEEEEEEGGGGGGGGGGGGDDDDDDDDEEEEEEEEEE

SEQ ID NO: 145 - protein, 3496 aa, Drosophila melanogaster
MMMMMMMMRRRRRRRRRRREEEEEEEEEIIIIIIIIVVVVVVVHHHHHHHHHHIIIIIIIIQQQQQQQQQAAAAAGGGGQQQQQQQQQCCCCCCGGGGNNNNNNNNQQQQQQQQQIIIIIIIIGGGGGGGGKKKKKKKKKFFFFFFFFFFFWWWWWWWWWWWWWWEEEEEEEEEVVVVVVVIIIIIIIISSSSSSDDDDDDDDEEEEEEEEEHHHHHHHHHHCCCCCCIIIIIIIIDDDDDDDDAAAAATTTTTTTGGGGTTTTTTTYYYYYYYYYYYYYYYYYYYYYYYYGGGGDDDDDDDDSSSSSSDDDDDDDDLLLLLLLLQQQQQQQQQLLLLLLLLEEEEEEEEERRRRRRRRRRRIIIIIIIINNNNNNNNVVVVVVVYYYYYYYYYYYYYYYYYYYYYYYYNNNNNNNNEEEEEEEEEAAAAATTTTTTTGGGGAAAAAKKKKKKKKKYYYYYYYYYYYYVVVVVVVPPPPPPPRRRRRRRRRRRAAAAAIIIIIIIILLLLLLLLVVVVVVVDDDDDDDDLLLLLLLLEEEEEEEEEPPPPPPPGGGGTTTTTTTMMMMMMMMDDDDDDDDSSSSSSVVVVVVVRRRRRRRRRRRSSSSSSGGGGAAAAAFFFFFFFFFFFGGGGQQQQQQQQQIIIIIIIIFFFFFFFFFFFRRRRRRRRRRRPPPPPPPDDDDDDDDNNNNNNNNFFFFFFFFFFFVVVVVVVFFFFFFFFFFFGGGGQQQQQQQQQSSSSSSGGGGAAAAAGGGGNNNNNNNNNNNNNNNNWWWWWWWWWWWWWWAAAAAKKKKKKKKKGGGGHHHHHHHHHHYYYYYYYYYYYYTTTTTTTEEEEEEEEEGGGGAAAAAEEEEEEEEELLLLLLLLVVVVVVVDDDDDDDDSSSSSSVVVVVVVLLLLLLLLDDDDDDDDVVVVVVVVVVVVVVRRRRRRRRRRRKKKKKKKKKEEEEEEEEESSSSSSEEEEEEEEEGGGGCCCCCCDDDDDDDDCCCCCCLLLLLLLLQQQQQQQQQGGGGFFFFFFFFFFFQQQQQQQQQLLLLLLLLTTTTTTTHHHHHHHHHHSSSSSSLLLLLLLLGGGGGGGGGGGGTTTTTTTGGGGSSSSSSGGGGMMMMMMMMGGGGTTTTTTTLLLLLLLLLLLLLLLLIIIIIIIISSSSSSKKKKKKKKKIIIIIIIIRRRRRRRRRRREEEEEEEEEEEEEEEEEEYYYYYYYYYYYYPPPPPPPDDDDDDDDRRRRRRRRRRRIIIIIIIIMMMMMMMMNNNNNNNNTTTTTTTFFFFFFFFFFFSSSSSSVVVVVVVVVVVVVVPPPPPPPSSSSSSPPPPPPPKKKKKKKKKVVVVVVVSSSSSSDDDDDDDDTTTTTTTVVVVVVVVVVVVVVEEEEEEEEEPPPPPPPYYYYYYYYYYYYNNNNNNNNAAAAATTTTTTTLLLLLLLLSSSSSSVVVVVVVHHHHHHHHHHQQQQQQQQQLLLLLLLLVVVVVVVEEEEEEEEENNNNNNNNTTTTTTTDDDDDDDDEEEEEEEEETTTTTTTYYYYYYYYYYYYCCCCCCIIIIIIIIDDDDDDDDNNNNNNNNEEEEEEEEEAAAAALLLLLLLLYYYYYYYYYYYYDDDDDDDDIIIIIIIICCCCCCFFFFFFFFFFFRRRRRRRRRRRTTTTTTTLLLLLLLLKKKKKKKKKLLLLLLLLTTTTTTTTTTTTTTPPPPPPPTTTTTTTYYYYYYYYYYYYGGGGDDDDDDDDLLLLLLLLNNNNNNNNHHHHHHHHHHLLLLLLLLVVVVVVVSSSSSSAAAAATTTTTTTMMMMMMMMSSSSSSGGGGVVVVVVVTTTTTTTTTTTTTTCCCCCCLLLLLLLLRRRRRRRRRRRFFFFFFFFFFFPPPPPPPGGGGQQQQQQQQQLLLLLLLLNNNNNNNNAAAAADDDDDDDDLLLLLLLLRRRRRRRRRRRKKKKKKKKKLLLLLLLLAAAAAVVVVVVVNNNNNNNNMMMMMMMMVVVVVVVPPPPPPPFFFFFFFFFFFPPPPPPPRRRRRRRRRRRLLLLLLLLHHHHHHHHHHFFFFFFFFFFFFFFFFFFFFFFMMMMMMMMPPPPPPPGGGGFFFFFFFFFFFAAAAAPPPPPPPLLLLLLLLTTTTTTTSSSSSSRRRRRRRRRRRGGGGSSSSSSQQQQQQQQQQQQQQQQQQYYYYYYYYYYYYRRRRRRRRRRRAAAAALLLLLLLLTTTTTTTVVVVVVVPPPPPPPEEEEEEEEELLLLLLLLTTTTTTTQQQQQQQQQQQQQQQQQQMMMMMMMMFFFFFFFFFFFDDDDDDDDAAAAAKKKKKKKKKNNNNNNNNMMMMMMMMMMMMMMMMAAAAAAAAAACCCCCCDDDDDDDDPPPPPPPRRRRRRRRRRRHHHHHHHHHHGGGGRRRRRRRRRRRYYYYYYYYYYYYLLLLLLLLTTTTTTTVVVVVVVAAAAAAAAAAIIIIIIIIFFFFFFFFFFFRRRRRRRRRRRGGGGRRRRRRRRRRRMMMMMMMMSSSSSSMMMMMMMMKKKKKKKKKEEEEEEEEEVVVVVVVDDDDDDDDEEEEEEEEEQQQQQQQQQMMMMMMMMLLLLLLLLNNNNNNNNIIIIIIIIQQQQQQQQQNNNNNNNNKKKKKKKKKNNNNNNNNSSSSSSSSSSSSFFFFFFFFFFFFFFFFFFFFFFVVVVVVVEEEEEEEEEWWWWWWWWWWWWWWIIIIIIIIPPPPPPPNNNNNNNNNNNNNNNNCCCCCCKKKKKKKKKTTTTTTTAAAAAVVVVVVVCCCCCCDDDDDDDDIIIIIIIIPPPPPPPPPPPPPPRRRRRRRRRRRGGGGLLLLLLLLKKKKKKKKKMMMMMMMMSSSSSSAAAAATTTTTTTFFFFFFFFFFFIIIIIIIIGGGGNNNNNNNNSSSSSSTTTTTTTAAAAAIIIIIIIIQQQQQQQQQEEEEEEEEELLLLLLLLFFFFFFFFFFFKKKKKKKKKRRRRRRRRRRRVVVVVVVSSSSSSEEEEEEEEEQQQQQQQQQFFFFFFFFFFFTTTTTTTAAAAAMMMMMMMMFFFFFFFFFFFRRRRRRRRRRRRRRRRRRRRRRKKKKKKKKKAAAAAFFFFFFFFFFFLLLLLLLLHHHHHHHHHHWWWWWWWWWWWWWWYYYYYYYYYYYYTTTTTTTGGGGEEEEEEEEEGGGGMMMMMMMMDDDDDDDDEEEEEEEEEMMMMMMMMEEEEEEEEEFFFFFFFFFFFTTTTTTTEEEEEEEEEAAAAAEEEEEEEEESSSSSSNNNNNNNNMMMMMMMMNNNNNNNNDDDDDDDDLLLLLLLLVVVVVVVSSSSSSEEEEEEEEEYYYYYYYYYYYYQQQQQQQQQQQQQQQQQQYYYYYYYYYYYYQQQQQQQQQEEEEEEEEEAAAAATTTTTTTAAAAADDDDDDDDEEEEEEEEEEEEEEEEEEGGGGEEEEEEEEEFFFFFFFFFFFDDDDDDDDEEEEEEEEEDDDDDDDDEEEEEEEEEEEEEEEEEEGGGGGGGGGGGGDDDDDDDDEEEEEEEEEE

SEQ ID NO: 146 - protein, 3523 aa, Eleusine indica
MMMMMMMMRRRRRRRRRRREEEEEEEEEIIIIIIIILLLLLLLLHHHHHHHHHHIIIIIIIIQQQQQQQQQGGGGGGGGQQQQQQQQQCCCCCCGGGGNNNNNNNNQQQQQQQQQIIIIIIIIGGGGAAAAAKKKKKKKKKFFFFFFFFFFFWWWWWWWWWWWWWWEEEEEEEEEVVVVVVVVVVVVVVCCCCCCDDDDDDDDEEEEEEEEEHHHHHHHHHHGGGGIIIIIIIIDDDDDDDDPPPPPPPTTTTTTTGGGGRRRRRRRRRRRYYYYYYYYYYYYTTTTTTTGGGGTTTTTTTSSSSSSDDDDDDDDLLLLLLLLQQQQQQQQQLLLLLLLLEEEEEEEEERRRRRRRRRRRVVVVVVVNNNNNNNNVVVVVVVYYYYYYYYYYYYYYYYYYYYYYYYNNNNNNNNEEEEEEEEEAAAAASSSSSSCCCCCCGGGGRRRRRRRRRRRFFFFFFFFFFFVVVVVVVPPPPPPPRRRRRRRRRRRAAAAAVVVVVVVLLLLLLLLMMMMMMMMDDDDDDDDLLLLLLLLEEEEEEEEEPPPPPPPGGGGTTTTTTTMMMMMMMMDDDDDDDDSSSSSSVVVVVVVRRRRRRRRRRRTTTTTTTGGGGPPPPPPPYYYYYYYYYYYYGGGGQQQQQQQQQIIIIIIIIFFFFFFFFFFFRRRRRRRRRRRPPPPPPPDDDDDDDDNNNNNNNNFFFFFFFFFFFVVVVVVVFFFFFFFFFFFGGGGQQQQQQQQQSSSSSSGGGGAAAAAGGGGNNNNNNNNNNNNNNNNWWWWWWWWWWWWWWAAAAAKKKKKKKKKGGGGHHHHHHHHHHYYYYYYYYYYYYTTTTTTTEEEEEEEEEGGGGAAAAAEEEEEEEEELLLLLLLLIIIIIIIIDDDDDDDDSSSSSSVVVVVVVLLLLLLLLDDDDDDDDVVVVVVVVVVVVVVRRRRRRRRRRRKKKKKKKKKEEEEEEEEEAAAAAEEEEEEEEENNNNNNNNCCCCCCDDDDDDDDCCCCCCLLLLLLLLQQQQQQQQQGGGGFFFFFFFFFFFQQQQQQQQQVVVVVVVCCCCCCHHHHHHHHHHSSSSSSLLLLLLLLGGGGGGGGGGGGTTTTTTTGGGGSSSSSSGGGGMMMMMMMMGGGGTTTTTTTLLLLLLLLLLLLLLLLIIIIIIIISSSSSSKKKKKKKKKIIIIIIIIRRRRRRRRRRREEEEEEEEEEEEEEEEEEYYYYYYYYYYYYPPPPPPPDDDDDDDDRRRRRRRRRRRMMMMMMMMMMMMMMMMLLLLLLLLTTTTTTTFFFFFFFFFFFSSSSSSVVVVVVVFFFFFFFFFFFPPPPPPPSSSSSSPPPPPPPKKKKKKKKKVVVVVVVSSSSSSDDDDDDDDTTTTTTTVVVVVVVVVVVVVVEEEEEEEEEPPPPPPPYYYYYYYYYYYYNNNNNNNNAAAAATTTTTTTLLLLLLLLSSSSSSVVVVVVVHHHHHHHHHHQQQQQQQQQLLLLLLLLVVVVVVVEEEEEEEEENNNNNNNNAAAAADDDDDDDDEEEEEEEEECCCCCCMMMMMMMMVVVVVVVLLLLLLLLDDDDDDDDNNNNNNNNEEEEEEEEEAAAAALLLLLLLLYYYYYYYYYYYYDDDDDDDDIIIIIIIICCCCCCFFFFFFFFFFFRRRRRRRRRRRTTTTTTTLLLLLLLLKKKKKKKKKLLLLLLLLTTTTTTTTTTTTTTPPPPPPPSSSSSSFFFFFFFFFFFGGGGDDDDDDDDLLLLLLLLNNNNNNNNHHHHHHHHHHLLLLLLLLIIIIIIIISSSSSSAAAAATTTTTTTMMMMMMMMSSSSSSGGGGVVVVVVVTTTTTTTCCCCCCCCCCCCLLLLLLLLRRRRRRRRRRRFFFFFFFFFFFPPPPPPPGGGGQQQQQQQQQLLLLLLLLNNNNNNNNSSSSSSDDDDDDDDLLLLLLLLRRRRRRRRRRRKKKKKKKKKLLLLLLLLAAAAAVVVVVVVNNNNNNNNLLLLLLLLIIIIIIIIPPPPPPPFFFFFFFFFFFPPPPPPPRRRRRRRRRRRLLLLLLLLHHHHHHHHHHFFFFFFFFFFFFFFFFFFFFFFMMMMMMMMVVVVVVVGGGGFFFFFFFFFFFAAAAAPPPPPPPLLLLLLLLTTTTTTTSSSSSSRRRRRRRRRRRGGGGSSSSSSQQQQQQQQQQQQQQQQQQYYYYYYYYYYYYRRRRRRRRRRRAAAAALLLLLLLLTTTTTTTVVVVVVVPPPPPPPEEEEEEEEELLLLLLLLTTTTTTTQQQQQQQQQQQQQQQQQQMMMMMMMMWWWWWWWWWWWWWWDDDDDDDDAAAAAKKKKKKKKKNNNNNNNNMMMMMMMMMMMMMMMMCCCCCCAAAAAAAAAADDDDDDDDPPPPPPPRRRRRRRRRRRHHHHHHHHHHGGGGRRRRRRRRRRRYYYYYYYYYYYYLLLLLLLLTTTTTTTAAAAASSSSSSAAAAAMMMMMMMMFFFFFFFFFFFRRRRRRRRRRRGGGGKKKKKKKKKMMMMMMMMSSSSSSTTTTTTTKKKKKKKKKEEEEEEEEEVVVVVVVDDDDDDDDEEEEEEEEEQQQQQQQQQMMMMMMMMIIIIIIIINNNNNNNNVVVVVVVQQQQQQQQQNNNNNNNNKKKKKKKKKNNNNNNNNSSSSSSSSSSSSYYYYYYYYYYYYFFFFFFFFFFFVVVVVVVEEEEEEEEEWWWWWWWWWWWWWWIIIIIIIIPPPPPPPNNNNNNNNNNNNNNNNVVVVVVVKKKKKKKKKSSSSSSSSSSSSVVVVVVVCCCCCCDDDDDDDDIIIIIIIIPPPPPPPPPPPPPPRRRRRRRRRRRGGGGLLLLLLLLSSSSSSMMMMMMMMAAAAASSSSSSTTTTTTTFFFFFFFFFFFIIIIIIIIGGGGNNNNNNNNSSSSSSTTTTTTTSSSSSSIIIIIIIIQQQQQQQQQEEEEEEEEEMMMMMMMMFFFFFFFFFFFRRRRRRRRRRRRRRRRRRRRRRVVVVVVVSSSSSSEEEEEEEEEQQQQQQQQQFFFFFFFFFFFTTTTTTTAAAAAMMMMMMMMFFFFFFFFFFFRRRRRRRRRRRRRRRRRRRRRRKKKKKKKKKAAAAAFFFFFFFFFFFLLLLLLLLHHHHHHHHHHWWWWWWWWWWWWWWYYYYYYYYYYYYTTTTTTTGGGGEEEEEEEEEGGGGMMMMMMMMDDDDDDDDEEEEEEEEEMMMMMMMMEEEEEEEEEFFFFFFFFFFFTTTTTTTEEEEEEEEEAAAAAEEEEEEEEESSSSSSNNNNNNNNMMMMMMMMNNNNNNNNDDDDDDDDLLLLLLLLVVVVVVVSSSSSSEEEEEEEEEYYYYYYYYYYYYQQQQQQQQQQQQQQQQQQYYYYYYYYYYYYQQQQQQQQQDDDDDDDDAAAAATTTTTTTAAAAADDDDDDDDEEEEEEEEEDDDDDDDDGGGGEEEEEEEEEYYYYYYYYYYYYEEEEEEEEEDDDDDDDDEEEEEEEEELLLLLLLLDDDDDDDDGGGGQQQQQQQQQEEEEEEEEEEEEEEEEEEEEEEEEEEEDDDDDDDDMMMMMMMMM

SEQ ID NO: 147 - protein, 3499 aa, Emericella nidulans
MMMMMMMMRRRRRRRRRRREEEEEEEEEIIIIIIIIVVVVVVVHHHHHHHHHHLLLLLLLLQQQQQQQQQTTTTTTTGGGGQQQQQQQQQCCCCCCGGGGNNNNNNNNQQQQQQQQQVVVVVVVGGGGSSSSSSAAAAAFFFFFFFFFFFWWWWWWWWWWWWWWQQQQQQQQQTTTTTTTIIIIIIIISSSSSSGGGGEEEEEEEEEHHHHHHHHHHGGGGLLLLLLLLDDDDDDDDAAAAASSSSSSGGGGIIIIIIIIYYYYYYYYYYYYTTTTTTTGGGGDDDDDDDDSSSSSSDDDDDDDDLLLLLLLLQQQQQQQQQLLLLLLLLEEEEEEEEERRRRRRRRRRRMMMMMMMMNNNNNNNNVVVVVVVYYYYYYYYYYYYFFFFFFFFFFFNNNNNNNNEEEEEEEEEAAAAAGGGGGGGGNNNNNNNNKKKKKKKKKYYYYYYYYYYYYVVVVVVVPPPPPPPRRRRRRRRRRRAAAAAVVVVVVVLLLLLLLLIIIIIIIIDDDDDDDDLLLLLLLLEEEEEEEEEPPPPPPPGGGGTTTTTTTMMMMMMMMDDDDDDDDAAAAALLLLLLLLRRRRRRRRRRRSSSSSSGGGGPPPPPPPNNNNNNNNGGGGAAAAALLLLLLLLYYYYYYYYYYYYRRRRRRRRRRRPPPPPPPDDDDDDDDNNNNNNNNFFFFFFFFFFFIIIIIIIIYYYYYYYYYYYYGGGGQQQQQQQQQSSSSSSSSSSSSAAAAAGGGGNNNNNNNNNNNNNNNNCCCCCCAAAAAKKKKKKKKKGGGGHHHHHHHHHHYYYYYYYYYYYYTTTTTTTEEEEEEEEEGGGGAAAAAEEEEEEEEELLLLLLLLVVVVVVVDDDDDDDDQQQQQQQQQVVVVVVVIIIIIIIIDDDDDDDDVVVVVVVVVVVVVVRRRRRRRRRRRRRRRRRRRRRREEEEEEEEEAAAAAEEEEEEEEESSSSSSCCCCCCDDDDDDDDCCCCCCLLLLLLLLQQQQQQQQQAAAAAFFFFFFFFFFFQQQQQQQQQVVVVVVVTTTTTTTHHHHHHHHHHSSSSSSLLLLLLLLGGGGGGGGGGGGTTTTTTTGGGGSSSSSSGGGGMMMMMMMMGGGGTTTTTTTLLLLLLLLLLLLLLLLIIIIIIIISSSSSSKKKKKKKKKIIIIIIIIRRRRRRRRRRREEEEEEEEEEEEEEEEEEFFFFFFFFFFFPPPPPPPDDDDDDDDRRRRRRRRRRRMMMMMMMMMMMMMMMMAAAAATTTTTTTFFFFFFFFFFFSSSSSSVVVVVVVMMMMMMMMPPPPPPPSSSSSSPPPPPPPKKKKKKKKKVVVVVVVSSSSSSDDDDDDDDTTTTTTTVVVVVVVVVVVVVVEEEEEEEEEPPPPPPPYYYYYYYYYYYYNNNNNNNNAAAAATTTTTTTLLLLLLLLSSSSSSVVVVVVVHHHHHHHHHHQQQQQQQQQLLLLLLLLVVVVVVVEEEEEEEEEHHHHHHHHHHSSSSSSDDDDDDDDEEEEEEEEETTTTTTTFFFFFFFFFFFCCCCCCLLLLLLLLDDDDDDDDNNNNNNNNDDDDDDDDAAAAALLLLLLLLYYYYYYYYYYYYDDDDDDDDIIIIIIIICCCCCCIIIIIIIIRRRRRRRRRRRTTTTTTTLLLLLLLLKKKKKKKKKLLLLLLLLSSSSSSSSSSSSPPPPPPPSSSSSSYYYYYYYYYYYYGGGGDDDDDDDDLLLLLLLLNNNNNNNNHHHHHHHHHHLLLLLLLLVVVVVVVSSSSSSAAAAAVVVVVVVMMMMMMMMSSSSSSGGGGIIIIIIIITTTTTTTVVVVVVVSSSSSSLLLLLLLLRRRRRRRRRRRFFFFFFFFFFFPPPPPPPGGGGQQQQQQQQQLLLLLLLLNNNNNNNNSSSSSSDDDDDDDDLLLLLLLLRRRRRRRRRRRKKKKKKKKKLLLLLLLLAAAAAVVVVVVVNNNNNNNNMMMMMMMMVVVVVVVPPPPPPPFFFFFFFFFFFPPPPPPPRRRRRRRRRRRLLLLLLLLHHHHHHHHHHFFFFFFFFFFFFFFFFFFFFFFMMMMMMMMVVVVVVVGGGGFFFFFFFFFFFAAAAAPPPPPPPLLLLLLLLTTTTTTTSSSSSSRRRRRRRRRRRSSSSSSSSSSSSSSSSSSSSSSSSFFFFFFFFFFFRRRRRRRRRRRTTTTTTTIIIIIIIISSSSSSVVVVVVVPPPPPPPEEEEEEEEELLLLLLLLTTTTTTTQQQQQQQQQQQQQQQQQQMMMMMMMMFFFFFFFFFFFDDDDDDDDSSSSSSRRRRRRRRRRRNNNNNNNNMMMMMMMMMMMMMMMMTTTTTTTAAAAAAAAAANNNNNNNNYYYYYYYYYYYYQQQQQQQQQNNNNNNNNGGGGRRRRRRRRRRRFFFFFFFFFFFLLLLLLLLTTTTTTTCCCCCCSSSSSSTTTTTTTLLLLLLLLFFFFFFFFFFFRRRRRRRRRRRGGGGKKKKKKKKKVVVVVVVAAAAAMMMMMMMMKKKKKKKKKEEEEEEEEEVVVVVVVEEEEEEEEEDDDDDDDDQQQQQQQQQMMMMMMMMRRRRRRRRRRRNNNNNNNNMMMMMMMMQQQQQQQQQNNNNNNNNKKKKKKKKKYYYYYYYYYYYYSSSSSSSSSSSSYYYYYYYYYYYYFFFFFFFFFFFVVVVVVVEEEEEEEEEWWWWWWWWWWWWWWIIIIIIIIPPPPPPPNNNNNNNNNNNNNNNNVVVVVVVQQQQQQQQQTTTTTTTAAAAALLLLLLLLCCCCCCSSSSSSMMMMMMMMPPPPPPPPPPPPPPKKKKKKKKKGGGGLLLLLLLLKKKKKKKKKMMMMMMMMAAAAAAAAAATTTTTTTFFFFFFFFFFFVVVVVVVGGGGNNNNNNNNSSSSSSTTTTTTTSSSSSSVVVVVVVQQQQQQQQQEEEEEEEEELLLLLLLLFFFFFFFFFFFNNNNNNNNRRRRRRRRRRRVVVVVVVSSSSSSNNNNNNNNQQQQQQQQQFFFFFFFFFFFTTTTTTTAAAAAMMMMMMMMFFFFFFFFFFFRRRRRRRRRRRRRRRRRRRRRRKKKKKKKKKAAAAAFFFFFFFFFFFLLLLLLLLHHHHHHHHHHWWWWWWWWWWWWWWYYYYYYYYYYYYTTTTTTTGGGGEEEEEEEEEGGGGMMMMMMMMDDDDDDDDEEEEEEEEEMMMMMMMMEEEEEEEEEFFFFFFFFFFFTTTTTTTEEEEEEEEEAAAAAEEEEEEEEESSSSSSNNNNNNNNMMMMMMMMNNNNNNNNDDDDDDDDLLLLLLLLMMMMMMMMSSSSSSEEEEEEEEEYYYYYYYYYYYYQQQQQQQQQQQQQQQQQQYYYYYYYYYYYYQQQQQQQQQEEEEEEEEEAAAAATTTTTTTVVVVVVVSSSSSSDDDDDDDDGGGGEEEEEEEEEGGGGAAAAAYYYYYYYYYYYYDDDDDDDDAAAAAEEEEEEEEEEEEEEEEEEGGGGEEEEEEEEEAAAAAYYYYYYYYYYYYEEEEEEEEEQQQQQQQQQEEEEEEEEEEEEEEEEEEE

SEQ ID NO: 148 - protein, 3504 aa, Erysiphe pisi
MMMMMMMMRRRRRRRRRRREEEEEEEEEIIIIIIIIVVVVVVVHHHHHHHHHHLLLLLLLLQQQQQQQQQTTTTTTTGGGGQQQQQQQQQCCCCCCGGGGNNNNNNNNQQQQQQQQQIIIIIIIIGGGGAAAAAAAAAAFFFFFFFFFFFWWWWWWWWWWWWWWQQQQQQQQQTTTTTTTIIIIIIIISSSSSSGGGGEEEEEEEEEHHHHHHHHHHGGGGLLLLLLLLDDDDDDDDGGGGSSSSSSGGGGVVVVVVVYYYYYYYYYYYYNNNNNNNNGGGGTTTTTTTSSSSSSDDDDDDDDLLLLLLLLQQQQQQQQQLLLLLLLLEEEEEEEEERRRRRRRRRRRMMMMMMMMNNNNNNNNVVVVVVVYYYYYYYYYYYYFFFFFFFFFFFNNNNNNNNEEEEEEEEEAAAAASSSSSSGGGGNNNNNNNNKKKKKKKKKYYYYYYYYYYYYVVVVVVVPPPPPPPRRRRRRRRRRRAAAAAVVVVVVVLLLLLLLLVVVVVVVDDDDDDDDLLLLLLLLEEEEEEEEEPPPPPPPGGGGTTTTTTTMMMMMMMMDDDDDDDDAAAAAVVVVVVVRRRRRRRRRRRAAAAAGGGGPPPPPPPFFFFFFFFFFFGGGGQQQQQQQQQLLLLLLLLFFFFFFFFFFFRRRRRRRRRRRPPPPPPPDDDDDDDDNNNNNNNNFFFFFFFFFFFVVVVVVVFFFFFFFFFFFGGGGQQQQQQQQQSSSSSSGGGGAAAAAGGGGNNNNNNNNNNNNNNNNWWWWWWWWWWWWWWAAAAAKKKKKKKKKGGGGHHHHHHHHHHYYYYYYYYYYYYTTTTTTTEEEEEEEEEGGGGAAAAAEEEEEEEEELLLLLLLLVVVVVVVDDDDDDDDQQQQQQQQQVVVVVVVLLLLLLLLDDDDDDDDVVVVVVVVVVVVVVRRRRRRRRRRRRRRRRRRRRRREEEEEEEEEAAAAAEEEEEEEEEAAAAACCCCCCDDDDDDDDCCCCCCLLLLLLLLQQQQQQQQQGGGGFFFFFFFFFFFQQQQQQQQQIIIIIIIITTTTTTTHHHHHHHHHHSSSSSSLLLLLLLLGGGGGGGGGGGGTTTTTTTGGGGAAAAAGGGGMMMMMMMMGGGGTTTTTTTLLLLLLLLLLLLLLLLIIIIIIIISSSSSSKKKKKKKKKIIIIIIIIRRRRRRRRRRREEEEEEEEEEEEEEEEEEFFFFFFFFFFFPPPPPPPDDDDDDDDRRRRRRRRRRRMMMMMMMMMMMMMMMMAAAAATTTTTTTFFFFFFFFFFFSSSSSSVVVVVVVVVVVVVVPPPPPPPSSSSSSPPPPPPPKKKKKKKKKVVVVVVVSSSSSSDDDDDDDDTTTTTTTVVVVVVVVVVVVVVEEEEEEEEEPPPPPPPYYYYYYYYYYYYNNNNNNNNAAAAATTTTTTTLLLLLLLLSSSSSSVVVVVVVHHHHHHHHHHQQQQQQQQQLLLLLLLLVVVVVVVEEEEEEEEENNNNNNNNSSSSSSDDDDDDDDEEEEEEEEETTTTTTTFFFFFFFFFFFCCCCCCIIIIIIIIDDDDDDDDNNNNNNNNEEEEEEEEEAAAAALLLLLLLLYYYYYYYYYYYYEEEEEEEEEIIIIIIIICCCCCCMMMMMMMMRRRRRRRRRRRTTTTTTTLLLLLLLLKKKKKKKKKLLLLLLLLSSSSSSNNNNNNNNPPPPPPPSSSSSSYYYYYYYYYYYYGGGGDDDDDDDDLLLLLLLLNNNNNNNNHHHHHHHHHHLLLLLLLLVVVVVVVSSSSSSAAAAAVVVVVVVMMMMMMMMSSSSSSGGGGVVVVVVVTTTTTTTTTTTTTTCCCCCCLLLLLLLLRRRRRRRRRRRFFFFFFFFFFFPPPPPPPGGGGQQQQQQQQQLLLLLLLLNNNNNNNNSSSSSSDDDDDDDDLLLLLLLLRRRRRRRRRRRKKKKKKKKKLLLLLLLLAAAAAVVVVVVVNNNNNNNNMMMMMMMMVVVVVVVPPPPPPPFFFFFFFFFFFPPPPPPPRRRRRRRRRRRLLLLLLLLHHHHHHHHHHFFFFFFFFFFFFFFFFFFFFFFMMMMMMMMVVVVVVVGGGGFFFFFFFFFFFAAAAAPPPPPPPLLLLLLLLTTTTTTTSSSSSSRRRRRRRRRRRGGGGAAAAAHHHHHHHHHHSSSSSSFFFFFFFFFFFRRRRRRRRRRRAAAAAVVVVVVVTTTTTTTVVVVVVVPPPPPPPEEEEEEEEELLLLLLLLTTTTTTTQQQQQQQQQQQQQQQQQQMMMMMMMMYYYYYYYYYYYYDDDDDDDDPPPPPPPKKKKKKKKKNNNNNNNNMMMMMMMMMMMMMMMMAAAAAAAAAASSSSSSDDDDDDDDFFFFFFFFFFFRRRRRRRRRRRNNNNNNNNGGGGRRRRRRRRRRRYYYYYYYYYYYYLLLLLLLLTTTTTTTCCCCCCSSSSSSAAAAAIIIIIIIIFFFFFFFFFFFRRRRRRRRRRRGGGGKKKKKKKKKVVVVVVVSSSSSSMMMMMMMMKKKKKKKKKEEEEEEEEEVVVVVVVEEEEEEEEEDDDDDDDDQQQQQQQQQMMMMMMMMRRRRRRRRRRRNNNNNNNNVVVVVVVQQQQQQQQQNNNNNNNNKKKKKKKKKNNNNNNNNSSSSSSAAAAAYYYYYYYYYYYYFFFFFFFFFFFVVVVVVVEEEEEEEEEWWWWWWWWWWWWWWIIIIIIIIPPPPPPPNNNNNNNNNNNNNNNNVVVVVVVQQQQQQQQQTTTTTTTAAAAALLLLLLLLCCCCCCSSSSSSIIIIIIIIPPPPPPPPPPPPPPRRRRRRRRRRRGGGGLLLLLLLLKKKKKKKKKMMMMMMMMSSSSSSSSSSSSTTTTTTTFFFFFFFFFFFVVVVVVVGGGGNNNNNNNNSSSSSSTTTTTTTSSSSSSIIIIIIIIQQQQQQQQQEEEEEEEEELLLLLLLLFFFFFFFFFFFKKKKKKKKKRRRRRRRRRRRVVVVVVVGGGGDDDDDDDDQQQQQQQQQFFFFFFFFFFFTTTTTTTAAAAAMMMMMMMMFFFFFFFFFFFRRRRRRRRRRRRRRRRRRRRRRKKKKKKKKKAAAAAFFFFFFFFFFFLLLLLLLLHHHHHHHHHHWWWWWWWWWWWWWWYYYYYYYYYYYYTTTTTTTGGGGEEEEEEEEEGGGGMMMMMMMMDDDDDDDDEEEEEEEEEMMMMMMMMEEEEEEEEEFFFFFFFFFFFTTTTTTTEEEEEEEEEAAAAAEEEEEEEEESSSSSSNNNNNNNNMMMMMMMMNNNNNNNNDDDDDDDDLLLLLLLLVVVVVVVHHHHHHHHHHEEEEEEEEEYYYYYYYYYYYYQQQQQQQQQQQQQQQQQQYYYYYYYYYYYYQQQQQQQQQDDDDDDDDAAAAASSSSSSIIIIIIIISSSSSSEEEEEEEEEGGGGEEEEEEEEEEEEEEEEEEEEEEEEEEEYYYYYYYYYYYYEEEEEEEEEEEEEEEEEEEEEEEEEEEQQQQQQQQQQQQQQQQQQLLLLLLLLEEEEEEEEENNNNNNNNEEEEEEEEEEEEEEEEEEE

SEQ ID NO: 149 - protein, 3549 aa, Galactomyces geotrichum
MMMMMMMMRRRRRRRRRRREEEEEEEEEIIIIIIIIVVVVVVVSSSSSSIIIIIIIIQQQQQQQQQCCCCCCGGGGQQQQQQQQQAAAAAGGGGMMMMMMMMNNNNNNNNQQQQQQQQQVVVVVVVSSSSSSTTTTTTTAAAAAFFFFFFFFFFFWWWWWWWWWWWWWWSSSSSSTTTTTTTIIIIIIIITTTTTTTDDDDDDDDEEEEEEEEEHHHHHHHHHHGGGGLLLLLLLLDDDDDDDDAAAAADDDDDDDDGGGGHHHHHHHHHHLLLLLLLLRRRRRRRRRRRPPPPPPPDDDDDDDDAAAAASSSSSSSSSSSSLLLLLLLLEEEEEEEEESSSSSSDDDDDDDDRRRRRRRRRRRLLLLLLLLDDDDDDDDVVVVVVVFFFFFFFFFFFFFFFFFFFFFFNNNNNNNNEEEEEEEEEAAAAASSSSSSNNNNNNNNKKKKKKKKKKKKKKKKKKYYYYYYYYYYYYVVVVVVVPPPPPPPRRRRRRRRRRRAAAAAVVVVVVVAAAAAVVVVVVVDDDDDDDDLLLLLLLLEEEEEEEEEPPPPPPPAAAAATTTTTTTLLLLLLLLDDDDDDDDAAAAAIIIIIIIIRRRRRRRRRRRSSSSSSGGGGPPPPPPPLLLLLLLLGGGGHHHHHHHHHHIIIIIIIIYYYYYYYYYYYYRRRRRRRRRRRPPPPPPPDDDDDDDDNNNNNNNNLLLLLLLLIIIIIIIISSSSSSGGGGEEEEEEEEESSSSSSGGGGAAAAAGGGGNNNNNNNNNNNNNNNNWWWWWWWWWWWWWWAAAAAKKKKKKKKKGGGGFFFFFFFFFFFYYYYYYYYYYYYTTTTTTTEEEEEEEEEGGGGAAAAAEEEEEEEEELLLLLLLLMMMMMMMMDDDDDDDDSSSSSSVVVVVVVMMMMMMMMDDDDDDDDIIIIIIIIIIIIIIIIRRRRRRRRRRRRRRRRRRRRRREEEEEEEEEAAAAAEEEEEEEEEQQQQQQQQQSSSSSSEEEEEEEEESSSSSSLLLLLLLLQQQQQQQQQGGGGFFFFFFFFFFFQQQQQQQQQLLLLLLLLAAAAAHHHHHHHHHHSSSSSSLLLLLLLLGGGGGGGGGGGGTTTTTTTGGGGSSSSSSGGGGLLLLLLLLGGGGTTTTTTTLLLLLLLLLLLLLLLLLLLLLLLLTTTTTTTKKKKKKKKKIIIIIIIIRRRRRRRRRRREEEEEEEEEEEEEEEEEEYYYYYYYYYYYYPPPPPPPDDDDDDDDRRRRRRRRRRRMMMMMMMMLLLLLLLLSSSSSSTTTTTTTYYYYYYYYYYYYSSSSSSVVVVVVVLLLLLLLLPPPPPPPSSSSSSPPPPPPPKKKKKKKKKVVVVVVVSSSSSSDDDDDDDDTTTTTTTVVVVVVVTTTTTTTEEEEEEEEEPPPPPPPYYYYYYYYYYYYNNNNNNNNAAAAAVVVVVVVLLLLLLLLSSSSSSFFFFFFFFFFFHHHHHHHHHHQQQQQQQQQLLLLLLLLIIIIIIIIDDDDDDDDNNNNNNNNAAAAADDDDDDDDAAAAATTTTTTTYYYYYYYYYYYYCCCCCCLLLLLLLLDDDDDDDDNNNNNNNNEEEEEEEEEAAAAALLLLLLLLYYYYYYYYYYYYDDDDDDDDIIIIIIIICCCCCCEEEEEEEEEKKKKKKKKKTTTTTTTLLLLLLLLKKKKKKKKKIIIIIIIINNNNNNNNRRRRRRRRRRRPPPPPPPSSSSSSHHHHHHHHHHQQQQQQQQQDDDDDDDDLLLLLLLLNNNNNNNNSSSSSSLLLLLLLLIIIIIIIIAAAAALLLLLLLLVVVVVVVMMMMMMMMSSSSSSGGGGVVVVVVVTTTTTTTTTTTTTTGGGGLLLLLLLLRRRRRRRRRRRYYYYYYYYYYYYPPPPPPPGGGGQQQQQQQQQLLLLLLLLNNNNNNNNGGGGDDDDDDDDLLLLLLLLRRRRRRRRRRRKKKKKKKKKLLLLLLLLAAAAAVVVVVVVNNNNNNNNLLLLLLLLVVVVVVVPPPPPPPFFFFFFFFFFFPPPPPPPRRRRRRRRRRRLLLLLLLLHHHHHHHHHHFFFFFFFFFFFFFFFFFFFFFFTTTTTTTTTTTTTTGGGGFFFFFFFFFFFAAAAAPPPPPPPLLLLLLLLFFFFFFFFFFFAAAAAKKKKKKKKKNNNNNNNNSSSSSSRRRRRRRRRRRAAAAAFFFFFFFFFFFHHHHHHHHHHNNNNNNNNLLLLLLLLTTTTTTTVVVVVVVPPPPPPPEEEEEEEEELLLLLLLLTTTTTTTQQQQQQQQQQQQQQQQQQLLLLLLLLFFFFFFFFFFFNNNNNNNNPPPPPPPAAAAANNNNNNNNVVVVVVVMMMMMMMMAAAAAAAAAACCCCCCNNNNNNNNPPPPPPPYYYYYYYYYYYYHHHHHHHHHHGGGGRRRRRRRRRRRYYYYYYYYYYYYLLLLLLLLTTTTTTTIIIIIIIISSSSSSTTTTTTTIIIIIIIIFFFFFFFFFFFRRRRRRRRRRRGGGGQQQQQQQQQVVVVVVVAAAAAMMMMMMMMKKKKKKKKKEEEEEEEEEVVVVVVVEEEEEEEEEDDDDDDDDAAAAAIIIIIIIIHHHHHHHHHHTTTTTTTAAAAARRRRRRRRRRRTTTTTTTKKKKKKKKKYYYYYYYYYYYYSSSSSSPPPPPPPYYYYYYYYYYYYFFFFFFFFFFFVVVVVVVEEEEEEEEEWWWWWWWWWWWWWWIIIIIIIIPPPPPPPNNNNNNNNNNNNNNNNVVVVVVVQQQQQQQQQTTTTTTTSSSSSSVVVVVVVCCCCCCNNNNNNNNVVVVVVVPPPPPPPPPPPPPPKKKKKKKKKGGGGLLLLLLLLTTTTTTTTTTTTTTSSSSSSAAAAATTTTTTTFFFFFFFFFFFIIIIIIIIAAAAANNNNNNNNSSSSSSTTTTTTTAAAAAVVVVVVVQQQQQQQQQEEEEEEEEELLLLLLLLFFFFFFFFFFFEEEEEEEEERRRRRRRRRRRTTTTTTTAAAAANNNNNNNNQQQQQQQQQFFFFFFFFFFFSSSSSSVVVVVVVMMMMMMMMFFFFFFFFFFFKKKKKKKKKRRRRRRRRRRRKKKKKKKKKGGGGFFFFFFFFFFFLLLLLLLLHHHHHHHHHHWWWWWWWWWWWWWWYYYYYYYYYYYYTTTTTTTGGGGEEEEEEEEEGGGGMMMMMMMMEEEEEEEEEPPPPPPPVVVVVVVEEEEEEEEEFFFFFFFFFFFSSSSSSEEEEEEEEEAAAAAQQQQQQQQQSSSSSSDDDDDDDDLLLLLLLLEEEEEEEEEDDDDDDDDLLLLLLLLIIIIIIIILLLLLLLLEEEEEEEEEYYYYYYYYYYYYQQQQQQQQQQQQQQQQQQYYYYYYYYYYYYQQQQQQQQQNNNNNNNNAAAAAGGGGVVVVVVVDDDDDDDDEEEEEEEEEDDDDDDDDEEEEEEEEEEEEEEEEEELLLLLLLLMMMMMMMMDDDDDDDDHHHHHHHHHHEEEEEEEEEEEEEEEEEEYYYYYYYYYYYYAAAAADDDDDDDDEEEEEEEEEGGGGVVVVVVVEEEEEEEEEDDDDDDDDFFFFFFFFFFFNNNNNNNNN

SEQ ID NO: 150 - protein, 3573 aa, Homarus americanus
MMMMMMMMRRRRRRRRRRREEEEEEEEEIIIIIIIIVVVVVVVHHHHHHHHHHIIIIIIIIQQQQQQQQQTTTTTTTGGGGQQQQQQQQQCCCCCCGGGGNNNNNNNNQQQQQQQQQIIIIIIIIGGGGTTTTTTTKKKKKKKKKFFFFFFFFFFFWWWWWWWWWWWWWWEEEEEEEEEIIIIIIIIIIIIIIIISSSSSSDDDDDDDDEEEEEEEEEHHHHHHHHHHGGGGIIIIIIIIQQQQQQQQQPPPPPPPTTTTTTTGGGGEEEEEEEEEYYYYYYYYYYYYTTTTTTTTTTTTTTGGGGVVVVVVVEEEEEEEEEKKKKKKKKKDDDDDDDDLLLLLLLLMMMMMMMMEEEEEEEEELLLLLLLLQQQQQQQQQLLLLLLLLEEEEEEEEERRRRRRRRRRRIIIIIIIINNNNNNNNVVVVVVVYYYYYYYYYYYYYYYYYYYYYYYYNNNNNNNNEEEEEEEEEGGGGNNNNNNNNQQQQQQQQQGGGGKKKKKKKKKYYYYYYYYYYYYVVVVVVVPPPPPPPRRRRRRRRRRRAAAAAVVVVVVVLLLLLLLLVVVVVVVDDDDDDDDLLLLLLLLEEEEEEEEEPPPPPPPGGGGTTTTTTTMMMMMMMMDDDDDDDDSSSSSSVVVVVVVRRRRRRRRRRRAAAAAGGGGPPPPPPPHHHHHHHHHHGGGGQQQQQQQQQLLLLLLLLFFFFFFFFFFFKKKKKKKKKPPPPPPPDDDDDDDDSSSSSSFFFFFFFFFFFVVVVVVVFFFFFFFFFFFGGGGQQQQQQQQQSSSSSSGGGGAAAAAGGGGNNNNNNNNNNNNNNNNWWWWWWWWWWWWWWAAAAAKKKKKKKKKGGGGHHHHHHHHHHYYYYYYYYYYYYTTTTTTTEEEEEEEEEGGGGAAAAAEEEEEEEEELLLLLLLLVVVVVVVDDDDDDDDSSSSSSVVVVVVVLLLLLLLLDDDDDDDDVVVVVVVVVVVVVVRRRRRRRRRRRKKKKKKKKKKKKKKKKKKSSSSSSEEEEEEEEEKKKKKKKKKCCCCCCDDDDDDDDCCCCCCLLLLLLLLQQQQQQQQQGGGGFFFFFFFFFFFQQQQQQQQQLLLLLLLLTTTTTTTHHHHHHHHHHSSSSSSLLLLLLLLGGGGGGGGVVVVVVVTTTTTTTGGGGSSSSSSGGGGMMMMMMMMGGGGTTTTTTTLLLLLLLLLLLLLLLLVVVVVVVSSSSSSKKKKKKKKKIIIIIIIILLLLLLLLEEEEEEEEEEEEEEEEEEFFFFFFFFFFFPPPPPPPDDDDDDDDRRRRRRRRRRRIIIIIIIIMMMMMMMMVVVVVVVTTTTTTTFFFFFFFFFFFSSSSSSVVVVVVVVVVVVVVPPPPPPPSSSSSSPPPPPPPKKKKKKKKKVVVVVVVSSSSSSDDDDDDDDTTTTTTTVVVVVVVVVVVVVVEEEEEEEEEPPPPPPPYYYYYYYYYYYYNNNNNNNNAAAAATTTTTTTLLLLLLLLSSSSSSIIIIIIIIHHHHHHHHHHQQQQQQQQQLLLLLLLLVVVVVVVEEEEEEEEENNNNNNNNTTTTTTTDDDDDDDDEEEEEEEEETTTTTTTYYYYYYYYYYYYCCCCCCIIIIIIIIDDDDDDDDNNNNNNNNEEEEEEEEEAAAAALLLLLLLLYYYYYYYYYYYYDDDDDDDDIIIIIIIICCCCCCFFFFFFFFFFFRRRRRRRRRRRTTTTTTTLLLLLLLLKKKKKKKKKLLLLLLLLQQQQQQQQQNNNNNNNNPPPPPPPTTTTTTTYYYYYYYYYYYYGGGGDDDDDDDDLLLLLLLLNNNNNNNNHHHHHHHHHHLLLLLLLLVVVVVVVSSSSSSLLLLLLLLTTTTTTTMMMMMMMMSSSSSSGGGGVVVVVVVTTTTTTTTTTTTTTCCCCCCLLLLLLLLRRRRRRRRRRRFFFFFFFFFFFPPPPPPPGGGGQQQQQQQQQLLLLLLLLNNNNNNNNAAAAADDDDDDDDLLLLLLLLRRRRRRRRRRRKKKKKKKKKLLLLLLLLAAAAAVVVVVVVNNNNNNNNMMMMMMMMVVVVVVVPPPPPPPFFFFFFFFFFFPPPPPPPRRRRRRRRRRRLLLLLLLLHHHHHHHHHHFFFFFFFFFFFFFFFFFFFFFFMMMMMMMMPPPPPPPGGGGFFFFFFFFFFFAAAAAPPPPPPPLLLLLLLLTTTTTTTAAAAARRRRRRRRRRRGGGGSSSSSSQQQQQQQQQQQQQQQQQQYYYYYYYYYYYYRRRRRRRRRRRAAAAALLLLLLLLTTTTTTTVVVVVVVPPPPPPPEEEEEEEEELLLLLLLLTTTTTTTQQQQQQQQQQQQQQQQQQMMMMMMMMFFFFFFFFFFFDDDDDDDDAAAAAKKKKKKKKKNNNNNNNNMMMMMMMMMMMMMMMMAAAAAAAAAACCCCCCDDDDDDDDPPPPPPPRRRRRRRRRRRHHHHHHHHHHGGGGRRRRRRRRRRRYYYYYYYYYYYYLLLLLLLLTTTTTTTVVVVVVVAAAAAAAAAAIIIIIIIIFFFFFFFFFFFRRRRRRRRRRRGGGGRRRRRRRRRRRMMMMMMMMSSSSSSMMMMMMMMRRRRRRRRRRREEEEEEEEEVVVVVVVDDDDDDDDDDDDDDDDQQQQQQQQQMMMMMMMMYYYYYYYYYYYYNNNNNNNNIIIIIIIIQQQQQQQQQNNNNNNNNKKKKKKKKKNNNNNNNNSSSSSSSSSSSSFFFFFFFFFFFFFFFFFFFFFFVVVVVVVEEEEEEEEEWWWWWWWWWWWWWWIIIIIIIIPPPPPPPNNNNNNNNNNNNNNNNVVVVVVVKKKKKKKKKTTTTTTTAAAAAVVVVVVVCCCCCCDDDDDDDDIIIIIIIIPPPPPPPPPPPPPPRRRRRRRRRRRGGGGLLLLLLLLKKKKKKKKKMMMMMMMMSSSSSSAAAAATTTTTTTFFFFFFFFFFFIIIIIIIIGGGGNNNNNNNNSSSSSSTTTTTTTAAAAAIIIIIIIIQQQQQQQQQEEEEEEEEELLLLLLLLFFFFFFFFFFFKKKKKKKKKRRRRRRRRRRRVVVVVVVSSSSSSEEEEEEEEEQQQQQQQQQFFFFFFFFFFFTTTTTTTAAAAAMMMMMMMMFFFFFFFFFFFRRRRRRRRRRRRRRRRRRRRRRKKKKKKKKKAAAAAFFFFFFFFFFFLLLLLLLLHHHHHHHHHHWWWWWWWWWWWWWWYYYYYYYYYYYYTTTTTTTGGGGEEEEEEEEEGGGGMMMMMMMMDDDDDDDDEEEEEEEEEMMMMMMMMEEEEEEEEEFFFFFFFFFFFTTTTTTTEEEEEEEEEAAAAAEEEEEEEEESSSSSSNNNNNNNNMMMMMMMMNNNNNNNNDDDDDDDDLLLLLLLLVVVVVVVSSSSSSEEEEEEEEEYYYYYYYYYYYYQQQQQQQQQQQQQQQQQQYYYYYYYYYYYYQQQQQQQQQEEEEEEEEEAAAAATTTTTTTAAAAADDDDDDDDDDDDDDDDEEEEEEEEEAAAAAEEEEEEEEEFFFFFFFFFFFEEEEEEEEEEEEEEEEEEEEEEEEEEEGGGGEEEEEEEEEVVVVVVVEEEEEEEEEGGGGEEEEEEEEEYYYYYYYYYYYYDDDDDDDDD

SEQ ID NO: 151 - protein, 3496 aa, Homo sapiens
MMMMMMMMRRRRRRRRRRREEEEEEEEEIIIIIIIIVVVVVVVHHHHHHHHHHLLLLLLLLQQQQQQQQQAAAAAGGGGQQQQQQQQQCCCCCCGGGGNNNNNNNNQQQQQQQQQIIIIIIIIGGGGAAAAAKKKKKKKKKFFFFFFFFFFFWWWWWWWWWWWWWWEEEEEEEEEVVVVVVVIIIIIIIISSSSSSDDDDDDDDEEEEEEEEEHHHHHHHHHHGGGGIIIIIIIIDDDDDDDDPPPPPPPTTTTTTTGGGGTTTTTTTYYYYYYYYYYYYHHHHHHHHHHGGGGDDDDDDDDSSSSSSDDDDDDDDLLLLLLLLQQQQQQQQQLLLLLLLLEEEEEEEEERRRRRRRRRRRIIIIIIIINNNNNNNNVVVVVVVYYYYYYYYYYYYYYYYYYYYYYYYNNNNNNNNEEEEEEEEEAAAAATTTTTTTGGGGGGGGKKKKKKKKKYYYYYYYYYYYYVVVVVVVPPPPPPPRRRRRRRRRRRAAAAAVVVVVVVLLLLLLLLVVVVVVVDDDDDDDDLLLLLLLLEEEEEEEEEPPPPPPPGGGGTTTTTTTMMMMMMMMDDDDDDDDSSSSSSVVVVVVVRRRRRRRRRRRSSSSSSGGGGPPPPPPPFFFFFFFFFFFGGGGQQQQQQQQQIIIIIIIIFFFFFFFFFFFRRRRRRRRRRRPPPPPPPDDDDDDDDNNNNNNNNFFFFFFFFFFFVVVVVVVFFFFFFFFFFFGGGGQQQQQQQQQSSSSSSGGGGAAAAAGGGGNNNNNNNNNNNNNNNNWWWWWWWWWWWWWWAAAAAKKKKKKKKKGGGGHHHHHHHHHHYYYYYYYYYYYYTTTTTTTEEEEEEEEEGGGGAAAAAEEEEEEEEELLLLLLLLVVVVVVVDDDDDDDDSSSSSSVVVVVVVLLLLLLLLDDDDDDDDVVVVVVVVVVVVVVRRRRRRRRRRRKKKKKKKKKEEEEEEEEEAAAAAEEEEEEEEESSSSSSCCCCCCDDDDDDDDCCCCCCLLLLLLLLQQQQQQQQQGGGGFFFFFFFFFFFQQQQQQQQQLLLLLLLLTTTTTTTHHHHHHHHHHSSSSSSLLLLLLLLGGGGGGGGGGGGTTTTTTTGGGGSSSSSSGGGGMMMMMMMMGGGGTTTTTTTLLLLLLLLLLLLLLLLIIIIIIIISSSSSSKKKKKKKKKIIIIIIIIRRRRRRRRRRREEEEEEEEEEEEEEEEEEYYYYYYYYYYYYPPPPPPPDDDDDDDDRRRRRRRRRRRIIIIIIIIMMMMMMMMNNNNNNNNTTTTTTTFFFFFFFFFFFSSSSSSVVVVVVVVVVVVVVPPPPPPPSSSSSSPPPPPPPKKKKKKKKKVVVVVVVSSSSSSDDDDDDDDTTTTTTTVVVVVVVVVVVVVVEEEEEEEEEPPPPPPPYYYYYYYYYYYYNNNNNNNNAAAAATTTTTTTLLLLLLLLSSSSSSVVVVVVVHHHHHHHHHHQQQQQQQQQLLLLLLLLVVVVVVVEEEEEEEEENNNNNNNNTTTTTTTDDDDDDDDEEEEEEEEETTTTTTTYYYYYYYYYYYYCCCCCCIIIIIIIIDDDDDDDDNNNNNNNNEEEEEEEEEAAAAALLLLLLLLYYYYYYYYYYYYDDDDDDDDIIIIIIIICCCCCCFFFFFFFFFFFRRRRRRRRRRRTTTTTTTLLLLLLLLKKKKKKKKKLLLLLLLLTTTTTTTTTTTTTTPPPPPPPTTTTTTTYYYYYYYYYYYYGGGGDDDDDDDDLLLLLLLLNNNNNNNNHHHHHHHHHHLLLLLLLLVVVVVVVSSSSSSAAAAATTTTTTTMMMMMMMMSSSSSSGGGGVVVVVVVTTTTTTTTTTTTTTCCCCCCLLLLLLLLRRRRRRRRRRRFFFFFFFFFFFPPPPPPPGGGGQQQQQQQQQLLLLLLLLNNNNNNNNAAAAADDDDDDDDLLLLLLLLRRRRRRRRRRRKKKKKKKKKLLLLLLLLAAAAAVVVVVVVNNNNNNNNMMMMMMMMVVVVVVVPPPPPPPFFFFFFFFFFFPPPPPPPRRRRRRRRRRRLLLLLLLLHHHHHHHHHHFFFFFFFFFFFFFFFFFFFFFFMMMMMMMMPPPPPPPGGGGFFFFFFFFFFFAAAAAPPPPPPPLLLLLLLLTTTTTTTSSSSSSRRRRRRRRRRRGGGGSSSSSSQQQQQQQQQQQQQQQQQQYYYYYYYYYYYYRRRRRRRRRRRAAAAALLLLLLLLTTTTTTTVVVVVVVPPPPPPPEEEEEEEEELLLLLLLLTTTTTTTQQQQQQQQQQQQQQQQQQMMMMMMMMFFFFFFFFFFFDDDDDDDDAAAAAKKKKKKKKKNNNNNNNNMMMMMMMMMMMMMMMMAAAAAAAAAACCCCCCDDDDDDDDPPPPPPPRRRRRRRRRRRHHHHHHHHHHGGGGRRRRRRRRRRRYYYYYYYYYYYYLLLLLLLLTTTTTTTVVVVVVVAAAAAAAAAAVVVVVVVFFFFFFFFFFFRRRRRRRRRRRGGGGRRRRRRRRRRRMMMMMMMMSSSSSSMMMMMMMMKKKKKKKKKEEEEEEEEEVVVVVVVDDDDDDDDEEEEEEEEEQQQQQQQQQMMMMMMMMLLLLLLLLNNNNNNNNVVVVVVVQQQQQQQQQNNNNNNNNKKKKKKKKKNNNNNNNNSSSSSSSSSSSSYYYYYYYYYYYYFFFFFFFFFFFVVVVVVVEEEEEEEEEWWWWWWWWWWWWWWIIIIIIIIPPPPPPPNNNNNNNNNNNNNNNNVVVVVVVKKKKKKKKKTTTTTTTAAAAAVVVVVVVCCCCCCDDDDDDDDIIIIIIIIPPPPPPPPPPPPPPRRRRRRRRRRRGGGGLLLLLLLLKKKKKKKKKMMMMMMMMSSSSSSAAAAATTTTTTTFFFFFFFFFFFIIIIIIIIGGGGNNNNNNNNSSSSSSTTTTTTTAAAAAIIIIIIIIQQQQQQQQQEEEEEEEEELLLLLLLLFFFFFFFFFFFKKKKKKKKKRRRRRRRRRRRIIIIIIIISSSSSSEEEEEEEEEQQQQQQQQQFFFFFFFFFFFTTTTTTTAAAAAMMMMMMMMFFFFFFFFFFFRRRRRRRRRRRRRRRRRRRRRRKKKKKKKKKAAAAAFFFFFFFFFFFLLLLLLLLHHHHHHHHHHWWWWWWWWWWWWWWYYYYYYYYYYYYTTTTTTTGGGGEEEEEEEEEGGGGMMMMMMMMDDDDDDDDEEEEEEEEEMMMMMMMMEEEEEEEEEFFFFFFFFFFFTTTTTTTEEEEEEEEEAAAAAEEEEEEEEESSSSSSNNNNNNNNMMMMMMMMNNNNNNNNDDDDDDDDLLLLLLLLVVVVVVVSSSSSSEEEEEEEEEYYYYYYYYYYYYQQQQQQQQQQQQQQQQQQYYYYYYYYYYYYQQQQQQQQQDDDDDDDDAAAAATTTTTTTAAAAAEEEEEEEEEEEEEEEEEEEEEEEEEEEGGGGEEEEEEEEEFFFFFFFFFFFEEEEEEEEEEEEEEEEEEEEEEEEEEEAAAAAEEEEEEEEEEEEEEEEEEEEEEEEEEEVVVVVVVAAAAAA

SEQ ID NO: 152 - protein, 3523 aa, Solanum tuberosum
MMMMMMMMRRRRRRRRRRREEEEEEEEEIIIIIIIILLLLLLLLHHHHHHHHHHIIIIIIIIQQQQQQQQQGGGGGGGGQQQQQQQQQCCCCCCGGGGNNNNNNNNQQQQQQQQQIIIIIIIIGGGGAAAAAKKKKKKKKKFFFFFFFFFFFWWWWWWWWWWWWWWEEEEEEEEEVVVVVVVVVVVVVVCCCCCCAAAAAEEEEEEEEEHHHHHHHHHHGGGGIIIIIIIIDDDDDDDDSSSSSSTTTTTTTGGGGRRRRRRRRRRRYYYYYYYYYYYYEEEEEEEEEGGGGDDDDDDDDNNNNNNNNVVVVVVVLLLLLLLLQQQQQQQQQLLLLLLLLEEEEEEEEERRRRRRRRRRRVVVVVVVNNNNNNNNVVVVVVVYYYYYYYYYYYYYYYYYYYYYYYYNNNNNNNNEEEEEEEEEAAAAASSSSSSCCCCCCGGGGRRRRRRRRRRRFFFFFFFFFFFVVVVVVVPPPPPPPRRRRRRRRRRRAAAAAVVVVVVVLLLLLLLLMMMMMMMMDDDDDDDDLLLLLLLLEEEEEEEEEPPPPPPPGGGGTTTTTTTMMMMMMMMDDDDDDDDSSSSSSLLLLLLLLRRRRRRRRRRRSSSSSSGGGGTTTTTTTYYYYYYYYYYYYGGGGQQQQQQQQQIIIIIIIIFFFFFFFFFFFRRRRRRRRRRRPPPPPPPDDDDDDDDNNNNNNNNFFFFFFFFFFFVVVVVVVFFFFFFFFFFFGGGGQQQQQQQQQSSSSSSGGGGAAAAAGGGGNNNNNNNNNNNNNNNNWWWWWWWWWWWWWWAAAAAKKKKKKKKKGGGGHHHHHHHHHHYYYYYYYYYYYYTTTTTTTEEEEEEEEEGGGGAAAAAEEEEEEEEELLLLLLLLIIIIIIIIDDDDDDDDSSSSSSVVVVVVVLLLLLLLLDDDDDDDDVVVVVVVVVVVVVVRRRRRRRRRRRKKKKKKKKKEEEEEEEEEAAAAAEEEEEEEEENNNNNNNNCCCCCCDDDDDDDDCCCCCCLLLLLLLLQQQQQQQQQGGGGFFFFFFFFFFFQQQQQQQQQVVVVVVVCCCCCCHHHHHHHHHHSSSSSSLLLLLLLLGGGGGGGGGGGGTTTTTTTGGGGSSSSSSGGGGMMMMMMMMGGGGTTTTTTTLLLLLLLLLLLLLLLLIIIIIIIISSSSSSKKKKKKKKKIIIIIIIIRRRRRRRRRRREEEEEEEEEEEEEEEEEEYYYYYYYYYYYYPPPPPPPDDDDDDDDRRRRRRRRRRRMMMMMMMMMMMMMMMMLLLLLLLLTTTTTTTFFFFFFFFFFFSSSSSSVVVVVVVFFFFFFFFFFFPPPPPPPSSSSSSPPPPPPPKKKKKKKKKVVVVVVVSSSSSSDDDDDDDDTTTTTTTVVVVVVVVVVVVVVEEEEEEEEEPPPPPPPYYYYYYYYYYYYNNNNNNNNAAAAATTTTTTTLLLLLLLLSSSSSSVVVVVVVHHHHHHHHHHQQQQQQQQQLLLLLLLLVVVVVVVEEEEEEEEENNNNNNNNAAAAADDDDDDDDEEEEEEEEECCCCCCMMMMMMMMVVVVVVVLLLLLLLLDDDDDDDDNNNNNNNNEEEEEEEEEAAAAALLLLLLLLYYYYYYYYYYYYDDDDDDDDIIIIIIIICCCCCCFFFFFFFFFFFRRRRRRRRRRRTTTTTTTLLLLLLLLKKKKKKKKKLLLLLLLLTTTTTTTTTTTTTTPPPPPPPSSSSSSFFFFFFFFFFFGGGGDDDDDDDDLLLLLLLLNNNNNNNNHHHHHHHHHHLLLLLLLLIIIIIIIISSSSSSAAAAATTTTTTTMMMMMMMMSSSSSSGGGGVVVVVVVTTTTTTTCCCCCCCCCCCCLLLLLLLLRRRRRRRRRRRFFFFFFFFFFFPPPPPPPGGGGQQQQQQQQQLLLLLLLLNNNNNNNNSSSSSSDDDDDDDDLLLLLLLLRRRRRRRRRRRKKKKKKKKKLLLLLLLLAAAAAVVVVVVVNNNNNNNNLLLLLLLLIIIIIIIIPPPPPPPFFFFFFFFFFFPPPPPPPRRRRRRRRRRRLLLLLLLLHHHHHHHHHHFFFFFFFFFFFFFFFFFFFFFFMMMMMMMMVVVVVVVGGGGFFFFFFFFFFFAAAAAPPPPPPPLLLLLLLLTTTTTTTSSSSSSRRRRRRRRRRRGGGGSSSSSSQQQQQQQQQQQQQQQQQQYYYYYYYYYYYYRRRRRRRRRRRAAAAALLLLLLLLTTTTTTTVVVVVVVPPPPPPPEEEEEEEEELLLLLLLLTTTTTTTQQQQQQQQQQQQQQQQQQMMMMMMMMWWWWWWWWWWWWWWDDDDDDDDAAAAAKKKKKKKKKNNNNNNNNMMMMMMMMMMMMMMMMCCCCCCAAAAAAAAAADDDDDDDDPPPPPPPRRRRRRRRRRRHHHHHHHHHHGGGGRRRRRRRRRRRYYYYYYYYYYYYLLLLLLLLTTTTTTTAAAAASSSSSSAAAAAMMMMMMMMFFFFFFFFFFFRRRRRRRRRRRGGGGKKKKKKKKKMMMMMMMMSSSSSSTTTTTTTKKKKKKKKKEEEEEEEEEVVVVVVVDDDDDDDDEEEEEEEEEQQQQQQQQQMMMMMMMMIIIIIIIINNNNNNNNVVVVVVVQQQQQQQQQNNNNNNNNKKKKKKKKKNNNNNNNNSSSSSSSSSSSSYYYYYYYYYYYYFFFFFFFFFFFVVVVVVVEEEEEEEEEWWWWWWWWWWWWWWIIIIIIIIPPPPPPPNNNNNNNNNNNNNNNNVVVVVVVKKKKKKKKKSSSSSSTTTTTTTVVVVVVVCCCCCCDDDDDDDDIIIIIIIIPPPPPPPPPPPPPPTTTTTTTGGGGLLLLLLLLKKKKKKKKKMMMMMMMMAAAAASSSSSSTTTTTTTFFFFFFFFFFFIIIIIIIIGGGGNNNNNNNNSSSSSSTTTTTTTSSSSSSIIIIIIIIQQQQQQQQQEEEEEEEEEMMMMMMMMFFFFFFFFFFFRRRRRRRRRRRRRRRRRRRRRRVVVVVVVSSSSSSEEEEEEEEEQQQQQQQQQFFFFFFFFFFFTTTTTTTAAAAAMMMMMMMMFFFFFFFFFFFRRRRRRRRRRRRRRRRRRRRRRKKKKKKKKKAAAAAFFFFFFFFFFFLLLLLLLLHHHHHHHHHHWWWWWWWWWWWWWWYYYYYYYYYYYYTTTTTTTGGGGEEEEEEEEEGGGGMMMMMMMMDDDDDDDDEEEEEEEEEMMMMMMMMEEEEEEEEEFFFFFFFFFFFTTTTTTTEEEEEEEEEAAAAAEEEEEEEEESSSSSSNNNNNNNNMMMMMMMMNNNNNNNNDDDDDDDDLLLLLLLLVVVVVVVSSSSSSEEEEEEEEEYYYYYYYYYYYYQQQQQQQQQQQQQQQQQQYYYYYYYYYYYYQQQQQQQQQDDDDDDDDAAAAATTTTTTTAAAAADDDDDDDDEEEEEEEEEDDDDDDDDGGGGYYYYYYYYYYYYEEEEEEEEEYYYYYYYYYYYYEEEEEEEEEDDDDDDDDEEEEEEEEEEEEEEEEEEEEEEEEEEEVVVVVVVGGGGEEEEEEEEEEEEEEEEEEDDDDDDDDAAAAAA

SEQ ID NO: 153 - protein, 3488 aa, Zea mays
MMMMMMMMRRRRRRRRRRREEEEEEEEEIIIIIIIILLLLLLLLHHHHHHHHHHIIIIIIIIQQQQQQQQQGGGGGGGGQQQQQQQQQCCCCCCGGGGNNNNNNNNQQQQQQQQQIIIIIIIIGGGGSSSSSSKKKKKKKKKFFFFFFFFFFFWWWWWWWWWWWWWWEEEEEEEEEVVVVVVVVVVVVVVCCCCCCDDDDDDDDEEEEEEEEEHHHHHHHHHHGGGGIIIIIIIIDDDDDDDDPPPPPPPTTTTTTTGGGGRRRRRRRRRRRYYYYYYYYYYYYMMMMMMMMGGGGTTTTTTTSSSSSSDDDDDDDDVVVVVVVQQQQQQQQQLLLLLLLLEEEEEEEEERRRRRRRRRRRVVVVVVVNNNNNNNNVVVVVVVYYYYYYYYYYYYYYYYYYYYYYYYNNNNNNNNEEEEEEEEEAAAAASSSSSSCCCCCCGGGGRRRRRRRRRRRFFFFFFFFFFFVVVVVVVPPPPPPPRRRRRRRRRRRAAAAAVVVVVVVLLLLLLLLMMMMMMMMDDDDDDDDLLLLLLLLEEEEEEEEEPPPPPPPGGGGTTTTTTTMMMMMMMMDDDDDDDDAAAAAVVVVVVVRRRRRRRRRRRTTTTTTTGGGGPPPPPPPYYYYYYYYYYYYGGGGQQQQQQQQQIIIIIIIIFFFFFFFFFFFRRRRRRRRRRRPPPPPPPDDDDDDDDNNNNNNNNFFFFFFFFFFFVVVVVVVFFFFFFFFFFFGGGGQQQQQQQQQSSSSSSGGGGAAAAAGGGGNNNNNNNNNNNNNNNNWWWWWWWWWWWWWWAAAAAKKKKKKKKKGGGGHHHHHHHHHHYYYYYYYYYYYYTTTTTTTEEEEEEEEEGGGGAAAAAEEEEEEEEELLLLLLLLIIIIIIIIDDDDDDDDSSSSSSVVVVVVVLLLLLLLLDDDDDDDDVVVVVVVVVVVVVVRRRRRRRRRRRKKKKKKKKKEEEEEEEEEAAAAAEEEEEEEEENNNNNNNNCCCCCCDDDDDDDDCCCCCCLLLLLLLLQQQQQQQQQGGGGFFFFFFFFFFFQQQQQQQQQVVVVVVVCCCCCCHHHHHHHHHHSSSSSSLLLLLLLLGGGGGGGGGGGGTTTTTTTGGGGSSSSSSGGGGMMMMMMMMGGGGTTTTTTTLLLLLLLLLLLLLLLLIIIIIIIISSSSSSKKKKKKKKKIIIIIIIIRRRRRRRRRRREEEEEEEEEEEEEEEEEEYYYYYYYYYYYYPPPPPPPDDDDDDDDRRRRRRRRRRRMMMMMMMMMMMMMMMMMMMMMMMMTTTTTTTFFFFFFFFFFFSSSSSSVVVVVVVFFFFFFFFFFFPPPPPPPSSSSSSPPPPPPPKKKKKKKKKVVVVVVVSSSSSSDDDDDDDDTTTTTTTVVVVVVVVVVVVVVEEEEEEEEEPPPPPPPYYYYYYYYYYYYNNNNNNNNAAAAATTTTTTTLLLLLLLLSSSSSSVVVVVVVHHHHHHHHHHQQQQQQQQQLLLLLLLLVVVVVVVEEEEEEEEENNNNNNNNAAAAADDDDDDDDEEEEEEEEECCCCCCMMMMMMMMVVVVVVVLLLLLLLLDDDDDDDDNNNNNNNNEEEEEEEEEAAAAALLLLLLLLYYYYYYYYYYYYDDDDDDDDIIIIIIIICCCCCCFFFFFFFFFFFRRRRRRRRRRRTTTTTTTLLLLLLLLKKKKKKKKKLLLLLLLLTTTTTTTTTTTTTTPPPPPPPSSSSSSFFFFFFFFFFFGGGGDDDDDDDDLLLLLLLLNNNNNNNNHHHHHHHHHHLLLLLLLLIIIIIIIISSSSSSAAAAATTTTTTTMMMMMMMMSSSSSSGGGGVVVVVVVTTTTTTTCCCCCCCCCCCCLLLLLLLLRRRRRRRRRRRFFFFFFFFFFFPPPPPPPGGGGQQQQQQQQQLLLLLLLLNNNNNNNNSSSSSSDDDDDDDDLLLLLLLLRRRRRRRRRRRKKKKKKKKKLLLLLLLLAAAAAVVVVVVVNNNNNNNNLLLLLLLLIIIIIIIIPPPPPPPFFFFFFFFFFFPPPPPPPRRRRRRRRRRRLLLLLLLLHHHHHHHHHHFFFFFFFFFFFFFFFFFFFFFFMMMMMMMMVVVVVVVGGGGFFFFFFFFFFFAAAAAPPPPPPPLLLLLLLLTTTTTTTSSSSSSRRRRRRRRRRRGGGGSSSSSSQQQQQQQQQQQQQQQQQQYYYYYYYYYYYYRRRRRRRRRRRSSSSSSLLLLLLLLTTTTTTTVVVVVVVPPPPPPPEEEEEEEEELLLLLLLLTTTTTTTQQQQQQQQQQQQQQQQQQMMMMMMMMWWWWWWWWWWWWWWDDDDDDDDSSSSSSKKKKKKKKKNNNNNNNNMMMMMMMMMMMMMMMMCCCCCCAAAAAAAAAADDDDDDDDPPPPPPPRRRRRRRRRRRHHHHHHHHHHGGGGRRRRRRRRRRRYYYYYYYYYYYYLLLLLLLLTTTTTTTAAAAASSSSSSAAAAAMMMMMMMMFFFFFFFFFFFRRRRRRRRRRRGGGGKKKKKKKKKMMMMMMMMSSSSSSTTTTTTTKKKKKKKKKEEEEEEEEEVVVVVVVDDDDDDDDEEEEEEEEEQQQQQQQQQMMMMMMMMIIIIIIIINNNNNNNNVVVVVVVQQQQQQQQQNNNNNNNNKKKKKKKKKNNNNNNNNSSSSSSSSSSSSYYYYYYYYYYYYFFFFFFFFFFFVVVVVVVEEEEEEEEEWWWWWWWWWWWWWWIIIIIIIIPPPPPPPNNNNNNNNNNNNNNNNVVVVVVVKKKKKKKKKSSSSSSSSSSSSVVVVVVVCCCCCCDDDDDDDDIIIIIIIIPPPPPPPPPPPPPPRRRRRRRRRRRGGGGLLLLLLLLSSSSSSMMMMMMMMSSSSSSSSSSSSTTTTTTTFFFFFFFFFFFVVVVVVVGGGGNNNNNNNNSSSSSSTTTTTTTSSSSSSIIIIIIIIQQQQQQQQQEEEEEEEEEMMMMMMMMFFFFFFFFFFFRRRRRRRRRRRRRRRRRRRRRRVVVVVVVSSSSSSEEEEEEEEEQQQQQQQQQFFFFFFFFFFFTTTTTTTAAAAAMMMMMMMMFFFFFFFFFFFRRRRRRRRRRRRRRRRRRRRRRKKKKKKKKKAAAAAFFFFFFFFFFFLLLLLLLLHHHHHHHHHHWWWWWWWWWWWWWWYYYYYYYYYYYYTTTTTTTGGGGEEEEEEEEEGGGGMMMMMMMMDDDDDDDDEEEEEEEEEMMMMMMMMEEEEEEEEEFFFFFFFFFFFTTTTTTTEEEEEEEEEAAAAAEEEEEEEEESSSSSSNNNNNNNNMMMMMMMMNNNNNNNNDDDDDDDDLLLLLLLLVVVVVVVSSSSSSEEEEEEEEEYYYYYYYYYYYYQQQQQQQQQQQQQQQQQQYYYYYYYYYYYYQQQQQQQQQDDDDDDDDAAAAATTTTTTTAAAAADDDDDDDDEEEEEEEEEEEEEEEEEEAAAAADDDDDDDDYYYYYYYYYYYYEEEEEEEEEEEEEEEEEEEEEEEEEEEEEEEEEEEEAAAAAAAAAAAAAAAEEEEEEEEEE

SEQ ID NO: 154 - protein, 3518 aa, Oryza sativa
MMMMMMMMRRRRRRRRRRREEEEEEEEEIIIIIIIILLLLLLLLHHHHHHHHHHIIIIIIIIQQQQQQQQQGGGGGGGGQQQQQQQQQCCCCCCGGGGNNNNNNNNQQQQQQQQQIIIIIIIIGGGGAAAAAKKKKKKKKKFFFFFFFFFFFWWWWWWWWWWWWWWEEEEEEEEEVVVVVVVVVVVVVVCCCCCCDDDDDDDDEEEEEEEEEHHHHHHHHHHGGGGIIIIIIIIDDDDDDDDPPPPPPPTTTTTTTGGGGRRRRRRRRRRRYYYYYYYYYYYYTTTTTTTGGGGNNNNNNNNSSSSSSDDDDDDDDLLLLLLLLQQQQQQQQQLLLLLLLLEEEEEEEEERRRRRRRRRRRVVVVVVVNNNNNNNNVVVVVVVYYYYYYYYYYYYYYYYYYYYYYYYNNNNNNNNEEEEEEEEEAAAAASSSSSSCCCCCCGGGGRRRRRRRRRRRFFFFFFFFFFFVVVVVVVPPPPPPPRRRRRRRRRRRAAAAAVVVVVVVLLLLLLLLMMMMMMMMDDDDDDDDLLLLLLLLEEEEEEEEEPPPPPPPGGGGTTTTTTTMMMMMMMMDDDDDDDDSSSSSSVVVVVVVRRRRRRRRRRRTTTTTTTGGGGPPPPPPPYYYYYYYYYYYYGGGGQQQQQQQQQIIIIIIIIFFFFFFFFFFFRRRRRRRRRRRPPPPPPPDDDDDDDDNNNNNNNNFFFFFFFFFFFVVVVVVVFFFFFFFFFFFGGGGQQQQQQQQQSSSSSSGGGGAAAAAGGGGNNNNNNNNNNNNNNNNWWWWWWWWWWWWWWAAAAAKKKKKKKKKGGGGHHHHHHHHHHYYYYYYYYYYYYTTTTTTTEEEEEEEEEGGGGAAAAAEEEEEEEEELLLLLLLLIIIIIIIIDDDDDDDDSSSSSSVVVVVVVLLLLLLLLDDDDDDDDVVVVVVVVVVVVVVRRRRRRRRRRRKKKKKKKKKEEEEEEEEEAAAAAEEEEEEEEENNNNNNNNCCCCCCDDDDDDDDCCCCCCLLLLLLLLQQQQQQQQQGGGGFFFFFFFFFFFQQQQQQQQQVVVVVVVCCCCCCHHHHHHHHHHSSSSSSLLLLLLLLGGGGGGGGGGGGTTTTTTTGGGGSSSSSSGGGGMMMMMMMMGGGGTTTTTTTLLLLLLLLLLLLLLLLIIIIIIIISSSSSSKKKKKKKKKIIIIIIIIRRRRRRRRRRREEEEEEEEEEEEEEEEEEYYYYYYYYYYYYPPPPPPPDDDDDDDDRRRRRRRRRRRMMMMMMMMMMMMMMMMLLLLLLLLTTTTTTTFFFFFFFFFFFSSSSSSVVVVVVVFFFFFFFFFFFPPPPPPPSSSSSSPPPPPPPKKKKKKKKKVVVVVVVSSSSSSDDDDDDDDTTTTTTTVVVVVVVVVVVVVVEEEEEEEEEPPPPPPPYYYYYYYYYYYYNNNNNNNNAAAAATTTTTTTLLLLLLLLSSSSSSVVVVVVVHHHHHHHHHHQQQQQQQQQLLLLLLLLVVVVVVVEEEEEEEEENNNNNNNNAAAAADDDDDDDDEEEEEEEEECCCCCCMMMMMMMMVVVVVVVLLLLLLLLDDDDDDDDNNNNNNNNEEEEEEEEEAAAAALLLLLLLLYYYYYYYYYYYYDDDDDDDDIIIIIIIICCCCCCFFFFFFFFFFFRRRRRRRRRRRTTTTTTTLLLLLLLLKKKKKKKKKLLLLLLLLTTTTTTTTTTTTTTPPPPPPPSSSSSSFFFFFFFFFFFGGGGDDDDDDDDLLLLLLLLNNNNNNNNHHHHHHHHHHLLLLLLLLIIIIIIIISSSSSSAAAAATTTTTTTMMMMMMMMSSSSSSGGGGVVVVVVVTTTTTTTCCCCCCCCCCCCLLLLLLLLRRRRRRRRRRRFFFFFFFFFFFPPPPPPPGGGGQQQQQQQQQLLLLLLLLNNNNNNNNSSSSSSDDDDDDDDLLLLLLLLRRRRRRRRRRRKKKKKKKKKLLLLLLLLAAAAAVVVVVVVNNNNNNNNLLLLLLLLIIIIIIIIPPPPPPPFFFFFFFFFFFPPPPPPPRRRRRRRRRRRLLLLLLLLHHHHHHHHHHFFFFFFFFFFFFFFFFFFFFFFMMMMMMMMVVVVVVVGGGGFFFFFFFFFFFAAAAAPPPPPPPLLLLLLLLTTTTTTTSSSSSSRRRRRRRRRRRGGGGSSSSSSQQQQQQQQQQQQQQQQQQYYYYYYYYYYYYRRRRRRRRRRRAAAAALLLLLLLLTTTTTTTVVVVVVVPPPPPPPEEEEEEEEELLLLLLLLTTTTTTTQQQQQQQQQQQQQQQQQQMMMMMMMMWWWWWWWWWWWWWWDDDDDDDDAAAAAKKKKKKKKKNNNNNNNNMMMMMMMMMMMMMMMMCCCCCCAAAAAAAAAADDDDDDDDPPPPPPPRRRRRRRRRRRHHHHHHHHHHGGGGRRRRRRRRRRRYYYYYYYYYYYYLLLLLLLLTTTTTTTAAAAASSSSSSAAAAAMMMMMMMMFFFFFFFFFFFRRRRRRRRRRRGGGGKKKKKKKKKMMMMMMMMSSSSSSTTTTTTTKKKKKKKKKEEEEEEEEEVVVVVVVDDDDDDDDEEEEEEEEEQQQQQQQQQMMMMMMMMIIIIIIIINNNNNNNNVVVVVVVQQQQQQQQQNNNNNNNNKKKKKKKKKNNNNNNNNSSSSSSSSSSSSYYYYYYYYYYYYFFFFFFFFFFFVVVVVVVEEEEEEEEEWWWWWWWWWWWWWWIIIIIIIIPPPPPPPNNNNNNNNNNNNNNNNVVVVVVVKKKKKKKKKSSSSSSSSSSSSVVVVVVVCCCCCCDDDDDDDDIIIIIIIIPPPPPPPPPPPPPPRRRRRRRRRRRGGGGLLLLLLLLSSSSSSMMMMMMMMAAAAASSSSSSTTTTTTTFFFFFFFFFFFIIIIIIIIGGGGNNNNNNNNSSSSSSTTTTTTTSSSSSSIIIIIIIIQQQQQQQQQEEEEEEEEEMMMMMMMMFFFFFFFFFFFRRRRRRRRRRRRRRRRRRRRRRVVVVVVVSSSSSSEEEEEEEEEQQQQQQQQQFFFFFFFFFFFTTTTTTTAAAAAMMMMMMMMFFFFFFFFFFFRRRRRRRRRRRRRRRRRRRRRRKKKKKKKKKAAAAAFFFFFFFFFFFLLLLLLLLHHHHHHHHHHWWWWWWWWWWWWWWYYYYYYYYYYYYTTTTTTTGGGGEEEEEEEEEGGGGMMMMMMMMDDDDDDDDEEEEEEEEEMMMMMMMMEEEEEEEEEFFFFFFFFFFFTTTTTTTEEEEEEEEEAAAAAEEEEEEEEESSSSSSNNNNNNNNMMMMMMMMNNNNNNNNDDDDDDDDLLLLLLLLVVVVVVVSSSSSSEEEEEEEEEYYYYYYYYYYYYQQQQQQQQQQQQQQQQQQYYYYYYYYYYYYQQQQQQQQQDDDDDDDDAAAAATTTTTTTAAAAADDDDDDDDEEEEEEEEEEEEEEEEEEGGGGEEEEEEEEEYYYYYYYYYYYYEEEEEEEEEDDDDDDDDEEEEEEEEEEEEEEEEEEQQQQQQQQQQQQQQQQQQEEEEEEEEEAAAAADDDDDDDDDDDDDDDDMMMMMMMMM

SEQ ID NO: 155 - protein, 3528 aa, Pisum sativum
EEEEEEEEEIIIIIIIIVVVVVVVHHHHHHHHHHIIIIIIIIQQQQQQQQQGGGGGGGGQQQQQQQQQCCCCCCGGGGNNNNNNNNQQQQQQQQQIIIIIIIIGGGGAAAAAKKKKKKKKKFFFFFFFFFFFWWWWWWWWWWWWWWEEEEEEEEEVVVVVVVVVVVVVVCCCCCCAAAAAEEEEEEEEEHHHHHHHHHHGGGGIIIIIIIIDDDDDDDDPPPPPPPTTTTTTTGGGGRRRRRRRRRRRYYYYYYYYYYYYGGGGGGGGDDDDDDDDTTTTTTTDDDDDDDDLLLLLLLLQQQQQQQQQLLLLLLLLEEEEEEEEERRRRRRRRRRRIIIIIIIINNNNNNNNVVVVVVVYYYYYYYYYYYYYYYYYYYYYYYYNNNNNNNNEEEEEEEEEAAAAASSSSSSCCCCCCGGGGRRRRRRRRRRRYYYYYYYYYYYYVVVVVVVPPPPPPPRRRRRRRRRRRAAAAAVVVVVVVLLLLLLLLMMMMMMMMDDDDDDDDLLLLLLLLEEEEEEEEEPPPPPPPGGGGTTTTTTTMMMMMMMMDDDDDDDDSSSSSSVVVVVVVRRRRRRRRRRRSSSSSSGGGGPPPPPPPYYYYYYYYYYYYGGGGQQQQQQQQQIIIIIIIIFFFFFFFFFFFRRRRRRRRRRRPPPPPPPDDDDDDDDNNNNNNNNFFFFFFFFFFFVVVVVVVFFFFFFFFFFFGGGGQQQQQQQQQSSSSSSGGGGAAAAAGGGGNNNNNNNNNNNNNNNNWWWWWWWWWWWWWWAAAAAKKKKKKKKKGGGGHHHHHHHHHHYYYYYYYYYYYYTTTTTTTEEEEEEEEEGGGGAAAAAEEEEEEEEELLLLLLLLIIIIIIIIDDDDDDDDSSSSSSVVVVVVVLLLLLLLLDDDDDDDDVVVVVVVVVVVVVVRRRRRRRRRRRKKKKKKKKKEEEEEEEEEAAAAAEEEEEEEEENNNNNNNNCCCCCCDDDDDDDDCCCCCCLLLLLLLLQQQQQQQQQGGGGFFFFFFFFFFFQQQQQQQQQVVVVVVVCCCCCCHHHHHHHHHHSSSSSSLLLLLLLLGGGGGGGGGGGGTTTTTTTGGGGSSSSSSGGGGMMMMMMMMGGGGTTTTTTTLLLLLLLLLLLLLLLLIIIIIIIISSSSSSKKKKKKKKKIIIIIIIIRRRRRRRRRRREEEEEEEEEEEEEEEEEEYYYYYYYYYYYYPPPPPPPDDDDDDDDRRRRRRRRRRRMMMMMMMMMMMMMMMMLLLLLLLLTTTTTTTFFFFFFFFFFFSSSSSSVVVVVVVFFFFFFFFFFFPPPPPPPSSSSSSPPPPPPPKKKKKKKKKVVVVVVVSSSSSSDDDDDDDDTTTTTTTVVVVVVVVVVVVVVEEEEEEEEEPPPPPPPYYYYYYYYYYYYNNNNNNNNAAAAATTTTTTTLLLLLLLLSSSSSSVVVVVVVHHHHHHHHHHQQQQQQQQQLLLLLLLLVVVVVVVEEEEEEEEENNNNNNNNAAAAADDDDDDDDEEEEEEEEECCCCCCMMMMMMMMVVVVVVVLLLLLLLLDDDDDDDDNNNNNNNNEEEEEEEEEAAAAALLLLLLLLYYYYYYYYYYYYDDDDDDDDIIIIIIIICCCCCCFFFFFFFFFFFRRRRRRRRRRRTTTTTTTLLLLLLLLKKKKKKKKKLLLLLLLLTTTTTTTTTTTTTTPPPPPPPSSSSSSFFFFFFFFFFFGGGGDDDDDDDDLLLLLLLLNNNNNNNNHHHHHHHHHHLLLLLLLLIIIIIIIISSSSSSAAAAATTTTTTTMMMMMMMMSSSSSSGGGGVVVVVVVTTTTTTTCCCCCCCCCCCCLLLLLLLLRRRRRRRRRRRFFFFFFFFFFFPPPPPPPGGGGQQQQQQQQQLLLLLLLLNNNNNNNNSSSSSSDDDDDDDDLLLLLLLLRRRRRRRRRRRKKKKKKKKKLLLLLLLLAAAAAVVVVVVVNNNNNNNNLLLLLLLLIIIIIIIIPPPPPPPFFFFFFFFFFFPPPPPPPRRRRRRRRRRRLLLLLLLLHHHHHHHHHHFFFFFFFFFFFFFFFFFFFFFFMMMMMMMMLLLLLLLLGGGGFFFFFFFFFFFAAAAAPPPPPPPLLLLLLLLTTTTTTTSSSSSSRRRRRRRRRRRGGGGSSSSSSQQQQQQQQQQQQQQQQQQYYYYYYYYYYYYRRRRRRRRRRRAAAAALLLLLLLLSSSSSSVVVVVVVPPPPPPPEEEEEEEEEIIIIIIIITTTTTTTQQQQQQQQQQQQQQQQQQMMMMMMMMWWWWWWWWWWWWWWDDDDDDDDSSSSSSKKKKKKKKKNNNNNNNNMMMMMMMMMMMMMMMMCCCCCCAAAAAAAAAADDDDDDDDPPPPPPPRRRRRRRRRRRHHHHHHHHHHGGGGRRRRRRRRRRRYYYYYYYYYYYYLLLLLLLLTTTTTTTAAAAASSSSSSAAAAAIIIIIIIIFFFFFFFFFFFRRRRRRRRRRRGGGGKKKKKKKKKMMMMMMMMSSSSSSTTTTTTTKKKKKKKKKEEEEEEEEEVVVVVVVDDDDDDDDEEEEEEEEEQQQQQQQQQMMMMMMMMMMMMMMMMNNNNNNNNVVVVVVVQQQQQQQQQNNNNNNNNKKKKKKKKKNNNNNNNNSSSSSSSSSSSSYYYYYYYYYYYYFFFFFFFFFFFVVVVVVVEEEEEEEEEWWWWWWWWWWWWWWIIIIIIIIPPPPPPPNNNNNNNNNNNNNNNNVVVVVVVKKKKKKKKKSSSSSSTTTTTTTVVVVVVVCCCCCCDDDDDDDDIIIIIIIIPPPPPPPPPPPPPPTTTTTTTGGGGLLLLLLLLKKKKKKKKKMMMMMMMMAAAAASSSSSSTTTTTTTFFFFFFFFFFFIIIIIIIIGGGGNNNNNNNNSSSSSSTTTTTTTSSSSSSIIIIIIIIQQQQQQQQQEEEEEEEEEMMMMMMMMFFFFFFFFFFFRRRRRRRRRRRRRRRRRRRRRRVVVVVVVSSSSSSEEEEEEEEEQQQQQQQQQFFFFFFFFFFFTTTTTTTAAAAAMMMMMMMMFFFFFFFFFFFRRRRRRRRRRRRRRRRRRRRRRKKKKKKKKKAAAAAFFFFFFFFFFFLLLLLLLLHHHHHHHHHHWWWWWWWWWWWWWWYYYYYYYYYYYYTTTTTTTGGGGEEEEEEEEEGGGGMMMMMMMMDDDDDDDDEEEEEEEEEMMMMMMMMEEEEEEEEEFFFFFFFFFFFTTTTTTTEEEEEEEEEAAAAAEEEEEEEEESSSSSSNNNNNNNNMMMMMMMMNNNNNNNNDDDDDDDDLLLLLLLLVVVVVVVSSSSSSEEEEEEEEEYYYYYYYYYYYYQQQQQQQQQQQQQQQQQQYYYYYYYYYYYYQQQQQQQQQDDDDDDDDAAAAATTTTTTTAAAAAEEEEEEEEEEEEEEEEEEDDDDDDDDEEEEEEEEEYYYYYYYYYYYYEEEEEEEEEEEEEEEEEEEEEEEEEEEEEEEEEEEEEEEEEEEEEDDDDDDDDYYYYYYYYYYYYHHHHHHHHHHQQQQQQQQQEEEEEEEEEHHHHHHHHHHDDDDDDDDEEEEEEEEEMMMMMMMMM

SEQ ID NO: 156 - protein, 3528 aa, Physarum polycephalum
MMMMMMMMRRRRRRRRRRREEEEEEEEEIIIIIIIIVVVVVVVHHHHHHHHHHVVVVVVVQQQQQQQQQVVVVVVVGGGGQQQQQQQQQCCCCCCGGGGNNNNNNNNQQQQQQQQQVVVVVVVGGGGAAAAAKKKKKKKKKFFFFFFFFFFFWWWWWWWWWWWWWWEEEEEEEEEVVVVVVVVVVVVVVSSSSSSEEEEEEEEEEEEEEEEEEHHHHHHHHHHGGGGIIIIIIIIDDDDDDDDSSSSSSAAAAAGGGGTTTTTTTYYYYYYYYYYYYKKKKKKKKKGGGGDDDDDDDDTTTTTTTDDDDDDDDLLLLLLLLQQQQQQQQQLLLLLLLLEEEEEEEEERRRRRRRRRRRIIIIIIIINNNNNNNNVVVVVVVYYYYYYYYYYYYYYYYYYYYYYYYNNNNNNNNEEEEEEEEEVVVVVVVAAAAAGGGGSSSSSSKKKKKKKKKYYYYYYYYYYYYVVVVVVVPPPPPPPRRRRRRRRRRRAAAAAVVVVVVVLLLLLLLLVVVVVVVDDDDDDDDLLLLLLLLEEEEEEEEEPPPPPPPGGGGVVVVVVVLLLLLLLLDDDDDDDDSSSSSSIIIIIIIIRRRRRRRRRRRAAAAASSSSSSSSSSSSIIIIIIIIGGGGSSSSSSMMMMMMMMFFFFFFFFFFFRRRRRRRRRRRPPPPPPPDDDDDDDDNNNNNNNNFFFFFFFFFFFTTTTTTTHHHHHHHHHHAAAAAQQQQQQQQQSSSSSSGGGGAAAAAGGGGNNNNNNNNNNNNNNNNWWWWWWWWWWWWWWAAAAAKKKKKKKKKGGGGHHHHHHHHHHYYYYYYYYYYYYTTTTTTTEEEEEEEEEGGGGAAAAAEEEEEEEEELLLLLLLLVVVVVVVEEEEEEEEESSSSSSVVVVVVVVVVVVVVDDDDDDDDVVVVVVVVVVVVVVRRRRRRRRRRRKKKKKKKKKEEEEEEEEEAAAAAEEEEEEEEENNNNNNNNCCCCCCDDDDDDDDCCCCCCLLLLLLLLQQQQQQQQQGGGGFFFFFFFFFFFQQQQQQQQQIIIIIIIICCCCCCHHHHHHHHHHSSSSSSLLLLLLLLGGGGGGGGGGGGTTTTTTTGGGGSSSSSSGGGGLLLLLLLLGGGGTTTTTTTLLLLLLLLLLLLLLLLIIIIIIIISSSSSSKKKKKKKKKIIIIIIIIRRRRRRRRRRREEEEEEEEEEEEEEEEEEFFFFFFFFFFFPPPPPPPDDDDDDDDRRRRRRRRRRRMMMMMMMMMMMMMMMMCCCCCCTTTTTTTFFFFFFFFFFFSSSSSSVVVVVVVMMMMMMMMPPPPPPPSSSSSSPPPPPPPKKKKKKKKKVVVVVVVSSSSSSDDDDDDDDTTTTTTTVVVVVVVVVVVVVVEEEEEEEEEPPPPPPPYYYYYYYYYYYYNNNNNNNNAAAAATTTTTTTLLLLLLLLSSSSSSIIIIIIIIHHHHHHHHHHQQQQQQQQQLLLLLLLLVVVVVVVEEEEEEEEENNNNNNNNAAAAADDDDDDDDEEEEEEEEEVVVVVVVMMMMMMMMCCCCCCIIIIIIIIDDDDDDDDNNNNNNNNEEEEEEEEEAAAAALLLLLLLLYYYYYYYYYYYYDDDDDDDDIIIIIIIICCCCCCFFFFFFFFFFFRRRRRRRRRRRTTTTTTTLLLLLLLLKKKKKKKKKLLLLLLLLTTTTTTTTTTTTTTPPPPPPPTTTTTTTYYYYYYYYYYYYGGGGDDDDDDDDLLLLLLLLNNNNNNNNHHHHHHHHHHLLLLLLLLVVVVVVVSSSSSSGGGGVVVVVVVMMMMMMMMSSSSSSGGGGIIIIIIIITTTTTTTAAAAACCCCCCLLLLLLLLRRRRRRRRRRRFFFFFFFFFFFPPPPPPPGGGGQQQQQQQQQLLLLLLLLNNNNNNNNSSSSSSDDDDDDDDLLLLLLLLRRRRRRRRRRRKKKKKKKKKLLLLLLLLAAAAAVVVVVVVNNNNNNNNLLLLLLLLIIIIIIIIPPPPPPPFFFFFFFFFFFPPPPPPPRRRRRRRRRRRLLLLLLLLHHHHHHHHHHFFFFFFFFFFFFFFFFFFFFFFLLLLLLLLIIIIIIIIGGGGYYYYYYYYYYYYAAAAAPPPPPPPLLLLLLLLTTTTTTTAAAAARRRRRRRRRRRSSSSSSAAAAAMMMMMMMMGGGGFFFFFFFFFFFRRRRRRRRRRRAAAAALLLLLLLLTTTTTTTVVVVVVVPPPPPPPEEEEEEEEELLLLLLLLTTTTTTTQQQQQQQQQQQQQQQQQQIIIIIIIIFFFFFFFFFFFDDDDDDDDSSSSSSRRRRRRRRRRRNNNNNNNNMMMMMMMMMMMMMMMMAAAAAAAAAASSSSSSDDDDDDDDPPPPPPPRRRRRRRRRRRHHHHHHHHHHGGGGRRRRRRRRRRRYYYYYYYYYYYYLLLLLLLLTTTTTTTAAAAASSSSSSAAAAATTTTTTTFFFFFFFFFFFRRRRRRRRRRRGGGGKKKKKKKKKMMMMMMMMSSSSSSTTTTTTTKKKKKKKKKEEEEEEEEEVVVVVVVDDDDDDDDEEEEEEEEEQQQQQQQQQMMMMMMMMHHHHHHHHHHAAAAAVVVVVVVQQQQQQQQQTTTTTTTKKKKKKKKKNNNNNNNNSSSSSSSSSSSSFFFFFFFFFFFFFFFFFFFFFFVVVVVVVEEEEEEEEEWWWWWWWWWWWWWWIIIIIIIIPPPPPPPNNNNNNNNNNNNNNNNIIIIIIIIKKKKKKKKKSSSSSSSSSSSSVVVVVVVCCCCCCDDDDDDDDIIIIIIIIPPPPPPPPPPPPPPKKKKKKKKKGGGGMMMMMMMMKKKKKKKKKMMMMMMMMSSSSSSAAAAATTTTTTTFFFFFFFFFFFIIIIIIIIGGGGNNNNNNNNNNNNNNNNTTTTTTTCCCCCCIIIIIIIIQQQQQQQQQEEEEEEEEELLLLLLLLFFFFFFFFFFFKKKKKKKKKRRRRRRRRRRRIIIIIIIIGGGGLLLLLLLLQQQQQQQQQFFFFFFFFFFFSSSSSSAAAAAMMMMMMMMFFFFFFFFFFFRRRRRRRRRRRRRRRRRRRRRRKKKKKKKKKAAAAAFFFFFFFFFFFLLLLLLLLHHHHHHHHHHWWWWWWWWWWWWWWYYYYYYYYYYYYTTTTTTTGGGGEEEEEEEEEGGGGMMMMMMMMDDDDDDDDEEEEEEEEEMMMMMMMMEEEEEEEEEFFFFFFFFFFFTTTTTTTEEEEEEEEEAAAAAEEEEEEEEESSSSSSNNNNNNNNMMMMMMMMNNNNNNNNDDDDDDDDLLLLLLLLVVVVVVVSSSSSSEEEEEEEEEYYYYYYYYYYYYQQQQQQQQQQQQQQQQQQYYYYYYYYYYYYQQQQQQQQQEEEEEEEEEAAAAASSSSSSVVVVVVVDDDDDDDDDDDDDDDDEEEEEEEEEAAAAAMMMMMMMMEEEEEEEEEDDDDDDDDDDDDDDDDAAAAAEEEEEEEEEAAAAAEEEEEEEEEGGGGGGGGAAAAAGGGGQQQQQQQQQNNNNNNNNEEEEEEEEEAAAAAVVVVVVVEEEEEEEEEEEEEEEEEEFFFFFFFFFFFF

SEQ ID NO: 157 - protein, 3317 aa, Porphyra purpurea
DDDDDDDDEEEEEEEEEHHHHHHHHHHGGGGVVVVVVVDDDDDDDDPPPPPPPTTTTTTTGGGGTTTTTTTYYYYYYYYYYYYHHHHHHHHHHGGGGDDDDDDDDSSSSSSDDDDDDDDLLLLLLLLQQQQQQQQQLLLLLLLLEEEEEEEEERRRRRRRRRRRIIIIIIIINNNNNNNNVVVVVVVYYYYYYYYYYYYYYYYYYYYYYYYNNNNNNNNEEEEEEEEEAAAAATTTTTTTGGGGGGGGRRRRRRRRRRRYYYYYYYYYYYYVVVVVVVPPPPPPPRRRRRRRRRRRAAAAAIIIIIIIILLLLLLLLMMMMMMMMDDDDDDDDLLLLLLLLEEEEEEEEEPPPPPPPGGGGTTTTTTTMMMMMMMMDDDDDDDDSSSSSSVVVVVVVRRRRRRRRRRRAAAAAGGGGPPPPPPPFFFFFFFFFFFGGGGQQQQQQQQQLLLLLLLLFFFFFFFFFFFRRRRRRRRRRRPPPPPPPDDDDDDDDNNNNNNNNFFFFFFFFFFFVVVVVVVFFFFFFFFFFFGGGGQQQQQQQQQTTTTTTTGGGGAAAAAGGGGNNNNNNNNNNNNNNNNWWWWWWWWWWWWWWAAAAAKKKKKKKKKGGGGHHHHHHHHHHYYYYYYYYYYYYTTTTTTTEEEEEEEEEGGGGAAAAAEEEEEEEEELLLLLLLLIIIIIIIIDDDDDDDDSSSSSSVVVVVVVLLLLLLLLDDDDDDDDVVVVVVVVVVVVVVRRRRRRRRRRRKKKKKKKKKEEEEEEEEEAAAAAEEEEEEEEESSSSSSCCCCCCDDDDDDDDCCCCCCLLLLLLLLQQQQQQQQQGGGGFFFFFFFFFFFQQQQQQQQQIIIIIIIITTTTTTTHHHHHHHHHHSSSSSSLLLLLLLLGGGGGGGGGGGGTTTTTTTGGGGSSSSSSGGGGMMMMMMMMGGGGTTTTTTTLLLLLLLLLLLLLLLLIIIIIIIISSSSSSKKKKKKKKKIIIIIIIIRRRRRRRRRRREEEEEEEEEEEEEEEEEEYYYYYYYYYYYYPPPPPPPDDDDDDDDRRRRRRRRRRRVVVVVVVMMMMMMMMLLLLLLLLTTTTTTTFFFFFFFFFFFSSSSSSVVVVVVVCCCCCCPPPPPPPSSSSSSPPPPPPPKKKKKKKKKVVVVVVVSSSSSSDDDDDDDDTTTTTTTVVVVVVVVVVVVVVEEEEEEEEEPPPPPPPYYYYYYYYYYYYNNNNNNNNAAAAATTTTTTTLLLLLLLLSSSSSSVVVVVVVHHHHHHHHHHQQQQQQQQQLLLLLLLLVVVVVVVEEEEEEEEENNNNNNNNAAAAADDDDDDDDEEEEEEEEEVVVVVVVMMMMMMMMVVVVVVVLLLLLLLLDDDDDDDDNNNNNNNNEEEEEEEEEAAAAALLLLLLLLYYYYYYYYYYYYDDDDDDDDIIIIIIIICCCCCCFFFFFFFFFFFRRRRRRRRRRRTTTTTTTLLLLLLLLKKKKKKKKKLLLLLLLLTTTTTTTTTTTTTTPPPPPPPTTTTTTTYYYYYYYYYYYYGGGGDDDDDDDDLLLLLLLLNNNNNNNNHHHHHHHHHHLLLLLLLLVVVVVVVCCCCCCAAAAACCCCCCMMMMMMMMSSSSSSGGGGVVVVVVVTTTTTTTSSSSSSCCCCCCLLLLLLLLRRRRRRRRRRRFFFFFFFFFFFPPPPPPPGGGGQQQQQQQQQLLLLLLLLNNNNNNNNSSSSSSDDDDDDDDLLLLLLLLRRRRRRRRRRRKKKKKKKKKLLLLLLLLAAAAAVVVVVVVNNNNNNNNLLLLLLLLIIIIIIIIPPPPPPPFFFFFFFFFFFPPPPPPPRRRRRRRRRRRLLLLLLLLHHHHHHHHHHFFFFFFFFFFFFFFFFFFFFFFMMMMMMMMIIIIIIIIGGGGFFFFFFFFFFFAAAAAPPPPPPPLLLLLLLLTTTTTTTSSSSSSRRRRRRRRRRRGGGGSSSSSSQQQQQQQQQQQQQQQQQQYYYYYYYYYYYYRRRRRRRRRRRAAAAALLLLLLLLTTTTTTTVVVVVVVPPPPPPPEEEEEEEEELLLLLLLLTTTTTTTQQQQQQQQQQQQQQQQQQQQQQQQQQQFFFFFFFFFFFDDDDDDDDAAAAAKKKKKKKKKNNNNNNNNMMMMMMMMMMMMMMMMCCCCCCAAAAAAAAAADDDDDDDDPPPPPPPRRRRRRRRRRRHHHHHHHHHHGGGGRRRRRRRRRRRYYYYYYYYYYYYLLLLLLLLTTTTTTTAAAAASSSSSSCCCCCCMMMMMMMMFFFFFFFFFFFRRRRRRRRRRRGGGGRRRRRRRRRRRMMMMMMMMSSSSSSTTTTTTTKKKKKKKKKEEEEEEEEEVVVVVVVDDDDDDDDEEEEEEEEEQQQQQQQQQMMMMMMMMLLLLLLLLNNNNNNNNVVVVVVVQQQQQQQQQNNNNNNNNKKKKKKKKKNNNNNNNNSSSSSSSSSSSSYYYYYYYYYYYYFFFFFFFFFFFVVVVVVVEEEEEEEEEWWWWWWWWWWWWWWIIIIIIIIPPPPPPPNNNNNNNNNNNNNNNNIIIIIIIIKKKKKKKKKSSSSSSSSSSSSVVVVVVVCCCCCCDDDDDDDDIIIIIIIIPPPPPPPPPPPPPPKKKKKKKKKGGGGLLLLLLLLKKKKKKKKKMMMMMMMMSSSSSSAAAAACCCCCCFFFFFFFFFFFIIIIIIIIGGGGNNNNNNNNSSSSSSTTTTTTTAAAAAIIIIIIIIQQQQQQQQQEEEEEEEEEMMMMMMMMFFFFFFFFFFFKKKKKKKKKRRRRRRRRRRRIIIIIIIIGGGGEEEEEEEEEQQQQQQQQQFFFFFFFFFFFTTTTTTTAAAAAMMMMMMMMFFFFFFFFFFFRRRRRRRRRRRRRRRRRRRRRRKKKKKKKKKAAAAAFFFFFFFFFFFLLLLLLLLHHHHHHHHHHWWWWWWWWWWWWWWYYYYYYYYYYYYTTTTTTTGGGGEEEEEEEEEGGGGMMMMMMMMDDDDDDDDEEEEEEEEEMMMMMMMMEEEEEEEEEFFFFFFFFFFFTTTTTTTEEEEEEEEEAAAAAEEEEEEEEESSSSSSNNNNNNNNMMMMMMMMNNNNNNNNDDDDDDDDLLLLLLLLVVVVVVVSSSSSSEEEEEEEEEYYYYYYYYYYYYQQQQQQQQQQQQQQQQQQYYYYYYYYYYYYQQQQQQQQQDDDDDDDDAAAAATTTTTTTAAAAAEEEEEEEEEEEEEEEEEEEEEEEEEEEGGGGEEEEEEEEEYYYYYYYYYYYYDDDDDDDDEEEEEEEEEDDDDDDDDEEEEEEEEEDDDDDDDDDDDDDDDDEEEEEEEEEGGGGGGGGDDDDDDDDYYYYYYYYYYYYAAAAAA

SEQ ID NO: 158 - protein, 3544 aa, Solanum tuberosum
MMMMMMMMRRRRRRRRRRREEEEEEEEEIIIIIIIILLLLLLLLHHHHHHHHHHIIIIIIIIQQQQQQQQQGGGGGGGGQQQQQQQQQCCCCCCGGGGNNNNNNNNQQQQQQQQQIIIIIIIIGGGGSSSSSSKKKKKKKKKFFFFFFFFFFFWWWWWWWWWWWWWWEEEEEEEEEVVVVVVVIIIIIIIICCCCCCDDDDDDDDEEEEEEEEEHHHHHHHHHHGGGGVVVVVVVDDDDDDDDPPPPPPPTTTTTTTGGGGRRRRRRRRRRRYYYYYYYYYYYYKKKKKKKKKGGGGTTTTTTTAAAAAAAAAAEEEEEEEEESSSSSSDDDDDDDDLLLLLLLLQQQQQQQQQLLLLLLLLEEEEEEEEERRRRRRRRRRRIIIIIIIINNNNNNNNVVVVVVVYYYYYYYYYYYYFFFFFFFFFFFNNNNNNNNEEEEEEEEEAAAAASSSSSSGGGGGGGGRRRRRRRRRRRYYYYYYYYYYYYVVVVVVVPPPPPPPRRRRRRRRRRRAAAAAVVVVVVVLLLLLLLLMMMMMMMMDDDDDDDDLLLLLLLLEEEEEEEEEPPPPPPPGGGGTTTTTTTMMMMMMMMDDDDDDDDSSSSSSIIIIIIIIRRRRRRRRRRRSSSSSSGGGGPPPPPPPYYYYYYYYYYYYGGGGQQQQQQQQQIIIIIIIIFFFFFFFFFFFRRRRRRRRRRRPPPPPPPDDDDDDDDNNNNNNNNLLLLLLLLVVVVVVVFFFFFFFFFFFGGGGQQQQQQQQQSSSSSSGGGGAAAAAGGGGNNNNNNNNNNNNNNNNWWWWWWWWWWWWWWAAAAAKKKKKKKKKGGGGHHHHHHHHHHYYYYYYYYYYYYTTTTTTTEEEEEEEEEGGGGAAAAAEEEEEEEEELLLLLLLLIIIIIIIIDDDDDDDDAAAAAVVVVVVVLLLLLLLLDDDDDDDDVVVVVVVVVVVVVVRRRRRRRRRRRKKKKKKKKKEEEEEEEEEAAAAAEEEEEEEEENNNNNNNNCCCCCCDDDDDDDDCCCCCCLLLLLLLLQQQQQQQQQGGGGFFFFFFFFFFFQQQQQQQQQVVVVVVVCCCCCCHHHHHHHHHHSSSSSSLLLLLLLLGGGGGGGGGGGGTTTTTTTGGGGSSSSSSGGGGMMMMMMMMGGGGTTTTTTTLLLLLLLLLLLLLLLLIIIIIIIISSSSSSKKKKKKKKKVVVVVVVRRRRRRRRRRREEEEEEEEEEEEEEEEEEYYYYYYYYYYYYPPPPPPPDDDDDDDDRRRRRRRRRRRMMMMMMMMMMMMMMMMLLLLLLLLTTTTTTTFFFFFFFFFFFSSSSSSVVVVVVVFFFFFFFFFFFPPPPPPPSSSSSSPPPPPPPKKKKKKKKKVVVVVVVSSSSSSDDDDDDDDTTTTTTTVVVVVVVVVVVVVVEEEEEEEEEPPPPPPPYYYYYYYYYYYYNNNNNNNNAAAAATTTTTTTLLLLLLLLSSSSSSVVVVVVVHHHHHHHHHHQQQQQQQQQLLLLLLLLVVVVVVVEEEEEEEEENNNNNNNNAAAAADDDDDDDDEEEEEEEEECCCCCCMMMMMMMMVVVVVVVLLLLLLLLDDDDDDDDNNNNNNNNEEEEEEEEEAAAAALLLLLLLLYYYYYYYYYYYYDDDDDDDDIIIIIIIICCCCCCFFFFFFFFFFFRRRRRRRRRRRTTTTTTTLLLLLLLLKKKKKKKKKLLLLLLLLTTTTTTTTTTTTTTPPPPPPPSSSSSSFFFFFFFFFFFGGGGDDDDDDDDLLLLLLLLNNNNNNNNHHHHHHHHHHLLLLLLLLIIIIIIIISSSSSSAAAAATTTTTTTMMMMMMMMSSSSSSGGGGVVVVVVVTTTTTTTCCCCCCCCCCCCLLLLLLLLRRRRRRRRRRRFFFFFFFFFFFPPPPPPPGGGGQQQQQQQQQLLLLLLLLNNNNNNNNSSSSSSDDDDDDDDLLLLLLLLRRRRRRRRRRRKKKKKKKKKLLLLLLLLAAAAAVVVVVVVNNNNNNNNLLLLLLLLIIIIIIIIPPPPPPPLLLLLLLLPPPPPPPRRRRRRRRRRRLLLLLLLLHHHHHHHHHHFFFFFFFFFFFFFFFFFFFFFFMMMMMMMMVVVVVVVGGGGFFFFFFFFFFFAAAAAPPPPPPPLLLLLLLLTTTTTTTSSSSSSRRRRRRRRRRRGGGGSSSSSSQQQQQQQQQQQQQQQQQQYYYYYYYYYYYYIIIIIIIISSSSSSLLLLLLLLTTTTTTTVVVVVVVPPPPPPPEEEEEEEEELLLLLLLLTTTTTTTQQQQQQQQQQQQQQQQQQMMMMMMMMWWWWWWWWWWWWWWDDDDDDDDAAAAAKKKKKKKKKNNNNNNNNMMMMMMMMMMMMMMMMCCCCCCAAAAAAAAAADDDDDDDDPPPPPPPRRRRRRRRRRRHHHHHHHHHHGGGGRRRRRRRRRRRYYYYYYYYYYYYLLLLLLLLTTTTTTTAAAAASSSSSSAAAAAMMMMMMMMFFFFFFFFFFFRRRRRRRRRRRGGGGKKKKKKKKKMMMMMMMMSSSSSSTTTTTTTKKKKKKKKKEEEEEEEEEVVVVVVVDDDDDDDDEEEEEEEEEQQQQQQQQQMMMMMMMMIIIIIIIINNNNNNNNVVVVVVVQQQQQQQQQNNNNNNNNKKKKKKKKKNNNNNNNNSSSSSSSSSSSSYYYYYYYYYYYYFFFFFFFFFFFVVVVVVVEEEEEEEEEWWWWWWWWWWWWWWIIIIIIIIPPPPPPPNNNNNNNNNNNNNNNNVVVVVVVKKKKKKKKKSSSSSSSSSSSSVVVVVVVCCCCCCDDDDDDDDIIIIIIIIPPPPPPPPPPPPPPTTTTTTTGGGGLLLLLLLLKKKKKKKKKMMMMMMMMAAAAASSSSSSTTTTTTTFFFFFFFFFFFVVVVVVVGGGGNNNNNNNNSSSSSSTTTTTTTSSSSSSIIIIIIIIQQQQQQQQQEEEEEEEEEMMMMMMMMFFFFFFFFFFFRRRRRRRRRRRRRRRRRRRRRRVVVVVVVSSSSSSEEEEEEEEEQQQQQQQQQFFFFFFFFFFFTTTTTTTAAAAAMMMMMMMMFFFFFFFFFFFRRRRRRRRRRRRRRRRRRRRRRKKKKKKKKKAAAAAFFFFFFFFFFFLLLLLLLLHHHHHHHHHHWWWWWWWWWWWWWWYYYYYYYYYYYYTTTTTTTGGGGEEEEEEEEEGGGGMMMMMMMMDDDDDDDDEEEEEEEEEMMMMMMMMEEEEEEEEEFFFFFFFFFFFTTTTTTTEEEEEEEEEAAAAAEEEEEEEEESSSSSSNNNNNNNNMMMMMMMMNNNNNNNNDDDDDDDDPPPPPPPVVVVVVVAAAAAEEEEEEEEEYYYYYYYYYYYYQQQQQQQQQQQQQQQQQQYYYYYYYYYYYYQQQQQQQQQDDDDDDDDAAAAATTTTTTTAAAAADDDDDDDDDDDDDDDDEEEEEEEEEEEEEEEEEEEEEEEEEEEYYYYYYYYYYYYDDDDDDDDDDDDDDDDEEEEEEEEEAAAAAAAAAADDDDDDDDDDDDDDDDHHHHHHHHHHHHHHHHHHHHQQQQQQQQQYYYYYYYYYYYYEEEEEEEEESSSSSSS

SEQ ID NO: 159 - protein, 3544 aa, Glycine max
MMMMMMMMRRRRRRRRRRREEEEEEEEESSSSSSLLLLLLLLHHHHHHHHHHIIIIIIIIQQQQQQQQQGGGGGGGGQQQQQQQQQCCCCCCGGGGNNNNNNNNQQQQQQQQQIIIIIIIIGGGGAAAAAKKKKKKKKKFFFFFFFFFFFWWWWWWWWWWWWWWEEEEEEEEEVVVVVVVVVVVVVVCCCCCCAAAAAEEEEEEEEEHHHHHHHHHHGGGGIIIIIIIIDDDDDDDDPPPPPPPTTTTTTTGGGGRRRRRRRRRRRYYYYYYYYYYYYGGGGGGGGDDDDDDDDSSSSSSEEEEEEEEELLLLLLLLQQQQQQQQQLLLLLLLLEEEEEEEEERRRRRRRRRRRIIIIIIIINNNNNNNNVVVVVVVYYYYYYYYYYYYYYYYYYYYYYYYNNNNNNNNEEEEEEEEEAAAAASSSSSSCCCCCCGGGGRRRRRRRRRRRFFFFFFFFFFFVVVVVVVRRRRRRRRRRRRRRRRRRRRRRAAAAAVVVVVVVLLLLLLLLMMMMMMMMDDDDDDDDLLLLLLLLEEEEEEEEEPPPPPPPGGGGTTTTTTTMMMMMMMMDDDDDDDDSSSSSSVVVVVVVRRRRRRRRRRRSSSSSSGGGGPPPPPPPYYYYYYYYYYYYGGGGQQQQQQQQQIIIIIIIIFFFFFFFFFFFRRRRRRRRRRRPPPPPPPDDDDDDDDNNNNNNNNFFFFFFFFFFFVVVVVVVFFFFFFFFFFFGGGGQQQQQQQQQSSSSSSGGGGAAAAAGGGGNNNNNNNNNNNNNNNNWWWWWWWWWWWWWWAAAAAKKKKKKKKKGGGGHHHHHHHHHHYYYYYYYYYYYYTTTTTTTEEEEEEEEEGGGGAAAAAEEEEEEEEELLLLLLLLIIIIIIIIDDDDDDDDSSSSSSVVVVVVVLLLLLLLLDDDDDDDDVVVVVVVVVVVVVVRRRRRRRRRRRKKKKKKKKKEEEEEEEEEAAAAAEEEEEEEEENNNNNNNNCCCCCCDDDDDDDDCCCCCCLLLLLLLLQQQQQQQQQGGGGFFFFFFFFFFFQQQQQQQQQVVVVVVVCCCCCCHHHHHHHHHHSSSSSSLLLLLLLLGGGGGGGGGGGGTTTTTTTGGGGSSSSSSGGGGMMMMMMMMGGGGTTTTTTTLLLLLLLLLLLLLLLLIIIIIIIISSSSSSKKKKKKKKKIIIIIIIIRRRRRRRRRRREEEEEEEEEEEEEEEEEEYYYYYYYYYYYYPPPPPPPDDDDDDDDRRRRRRRRRRRMMMMMMMMMMMMMMMMLLLLLLLLTTTTTTTFFFFFFFFFFFSSSSSSVVVVVVVFFFFFFFFFFFPPPPPPPSSSSSSPPPPPPPKKKKKKKKKVVVVVVVSSSSSSDDDDDDDDTTTTTTTVVVVVVVVVVVVVVEEEEEEEEEPPPPPPPYYYYYYYYYYYYNNNNNNNNAAAAATTTTTTTLLLLLLLLSSSSSSVVVVVVVHHHHHHHHHHQQQQQQQQQLLLLLLLLVVVVVVVEEEEEEEEENNNNNNNNAAAAADDDDDDDDEEEEEEEEESSSSSSMMMMMMMMVVVVVVVLLLLLLLLDDDDDDDDNNNNNNNNEEEEEEEEEAAAAALLLLLLLLYYYYYYYYYYYYDDDDDDDDIIIIIIIICCCCCCFFFFFFFFFFFRRRRRRRRRRRTTTTTTTLLLLLLLLKKKKKKKKKLLLLLLLLTTTTTTTTTTTTTTPPPPPPPSSSSSSFFFFFFFFFFFGGGGDDDDDDDDLLLLLLLLNNNNNNNNHHHHHHHHHHLLLLLLLLIIIIIIIISSSSSSAAAAATTTTTTTMMMMMMMMSSSSSSGGGGVVVVVVVTTTTTTTCCCCCCCCCCCCLLLLLLLLRRRRRRRRRRRFFFFFFFFFFFPPPPPPPGGGGQQQQQQQQQLLLLLLLLNNNNNNNNSSSSSSDDDDDDDDLLLLLLLLRRRRRRRRRRRKKKKKKKKKLLLLLLLLAAAAAVVVVVVVNNNNNNNNLLLLLLLLIIIIIIIIPPPPPPPFFFFFFFFFFFPPPPPPPRRRRRRRRRRRLLLLLLLLHHHHHHHHHHFFFFFFFFFFFFFFFFFFFFFFMMMMMMMMVVVVVVVGGGGFFFFFFFFFFFAAAAAPPPPPPPLLLLLLLLAAAAASSSSSSRRRRRRRRRRRGGGGSSSSSSQQQQQQQQQQQQQQQQQQYYYYYYYYYYYYRRRRRRRRRRRAAAAALLLLLLLLSSSSSSVVVVVVVPPPPPPPEEEEEEEEELLLLLLLLTTTTTTTQQQQQQQQQQQQQQQQQQMMMMMMMMWWWWWWWWWWWWWWDDDDDDDDSSSSSSKKKKKKKKKNNNNNNNNMMMMMMMMMMMMMMMMCCCCCCAAAAAAAAAADDDDDDDDPPPPPPPRRRRRRRRRRRHHHHHHHHHHGGGGRRRRRRRRRRRYYYYYYYYYYYYLLLLLLLLTTTTTTTAAAAASSSSSSAAAAAMMMMMMMMFFFFFFFFFFFRRRRRRRRRRRGGGGKKKKKKKKKMMMMMMMMSSSSSSTTTTTTTKKKKKKKKKEEEEEEEEEVVVVVVVDDDDDDDDEEEEEEEEEQQQQQQQQQMMMMMMMMIIIIIIIINNNNNNNNVVVVVVVQQQQQQQQQNNNNNNNNKKKKKKKKKNNNNNNNNSSSSSSSSSSSSYYYYYYYYYYYYFFFFFFFFFFFVVVVVVVEEEEEEEEEWWWWWWWWWWWWWWIIIIIIIIPPPPPPPHHHHHHHHHHNNNNNNNNVVVVVVVKKKKKKKKKSSSSSSTTTTTTTVVVVVVVCCCCCCDDDDDDDDIIIIIIIIPPPPPPPPPPPPPPTTTTTTTGGGGLLLLLLLLRRRRRRRRRRRMMMMMMMMAAAAASSSSSSTTTTTTTFFFFFFFFFFFIIIIIIIIGGGGNNNNNNNNSSSSSSTTTTTTTSSSSSSIIIIIIIIQQQQQQQQQEEEEEEEEEMMMMMMMMFFFFFFFFFFFRRRRRRRRRRRRRRRRRRRRRRVVVVVVVSSSSSSEEEEEEEEEQQQQQQQQQFFFFFFFFFFFTTTTTTTAAAAAMMMMMMMMFFFFFFFFFFFRRRRRRRRRRRRRRRRRRRRRRKKKKKKKKKAAAAAFFFFFFFFFFFLLLLLLLLHHHHHHHHHHWWWWWWWWWWWWWWYYYYYYYYYYYYTTTTTTTGGGGEEEEEEEEEGGGGMMMMMMMMDDDDDDDDEEEEEEEEEMMMMMMMMEEEEEEEEEFFFFFFFFFFFTTTTTTTEEEEEEEEEAAAAAEEEEEEEEESSSSSSNNNNNNNNMMMMMMMMNNNNNNNNDDDDDDDDLLLLLLLLVVVVVVVSSSSSSEEEEEEEEEYYYYYYYYYYYYQQQQQQQQQQQQQQQQQQYYYYYYYYYYYYQQQQQQQQQDDDDDDDDAAAAATTTTTTTAAAAADDDDDDDDEEEEEEEEEDDDDDDDDEEEEEEEEEYYYYYYYYYYYYEEEEEEEEEEEEEEEEEEEEEEEEEEEEEEEEEEEEEEEEEEEEEEEEEEEEEEEEEEEEEEEEEEEEEEEEFFFFFFFFFFFAAAAAQQQQQQQQQHHHHHHHHHHDDDDDDDDMMMMMMMMM

SEQ ID NO: 160 - protein, 3502 aa, Trichoderma viride
MMMMMMMMRRRRRRRRRRREEEEEEEEEIIIIIIIIVVVVVVVYYYYYYYYYYYYIIIIIIIIQQQQQQQQQTTTTTTTGGGGQQQQQQQQQCCCCCCGGGGNNNNNNNNQQQQQQQQQIIIIIIIIGGGGAAAAAAAAAAFFFFFFFFFFFWWWWWWWWWWWWWWQQQQQQQQQTTTTTTTIIIIIIIISSSSSSGGGGEEEEEEEEEHHHHHHHHHHGGGGLLLLLLLLDDDDDDDDSSSSSSNNNNNNNNGGGGIIIIIIIIYYYYYYYYYYYYNNNNNNNNGGGGSSSSSSSSSSSSEEEEEEEEELLLLLLLLQQQQQQQQQLLLLLLLLEEEEEEEEERRRRRRRRRRRMMMMMMMMNNNNNNNNVVVVVVVYYYYYYYYYYYYFFFFFFFFFFFNNNNNNNNEEEEEEEEEAAAAASSSSSSNNNNNNNNNNNNNNNNKKKKKKKKKYYYYYYYYYYYYVVVVVVVPPPPPPPRRRRRRRRRRRAAAAAVVVVVVVLLLLLLLLVVVVVVVDDDDDDDDLLLLLLLLEEEEEEEEEPPPPPPPGGGGTTTTTTTMMMMMMMMDDDDDDDDAAAAAVVVVVVVRRRRRRRRRRRAAAAAGGGGPPPPPPPFFFFFFFFFFFGGGGQQQQQQQQQLLLLLLLLFFFFFFFFFFFRRRRRRRRRRRPPPPPPPDDDDDDDDNNNNNNNNFFFFFFFFFFFIIIIIIIIFFFFFFFFFFFGGGGQQQQQQQQQSSSSSSSSSSSSAAAAAGGGGNNNNNNNNNNNNNNNNWWWWWWWWWWWWWWAAAAAKKKKKKKKKGGGGHHHHHHHHHHYYYYYYYYYYYYTTTTTTTEEEEEEEEEGGGGAAAAAEEEEEEEEELLLLLLLLVVVVVVVDDDDDDDDQQQQQQQQQVVVVVVVLLLLLLLLDDDDDDDDVVVVVVVVVVVVVVRRRRRRRRRRRRRRRRRRRRRREEEEEEEEEAAAAAEEEEEEEEEGGGGCCCCCCDDDDDDDDCCCCCCLLLLLLLLQQQQQQQQQGGGGFFFFFFFFFFFQQQQQQQQQIIIIIIIITTTTTTTHHHHHHHHHHSSSSSSLLLLLLLLGGGGGGGGGGGGTTTTTTTGGGGSSSSSSGGGGMMMMMMMMGGGGTTTTTTTLLLLLLLLLLLLLLLLLLLLLLLLSSSSSSKKKKKKKKKIIIIIIIIRRRRRRRRRRREEEEEEEEEEEEEEEEEEFFFFFFFFFFFPPPPPPPDDDDDDDDRRRRRRRRRRRMMMMMMMMMMMMMMMMAAAAATTTTTTTFFFFFFFFFFFSSSSSSVVVVVVVVVVVVVVPPPPPPPSSSSSSPPPPPPPKKKKKKKKKVVVVVVVSSSSSSDDDDDDDDTTTTTTTVVVVVVVVVVVVVVEEEEEEEEEPPPPPPPYYYYYYYYYYYYNNNNNNNNAAAAATTTTTTTLLLLLLLLSSSSSSVVVVVVVHHHHHHHHHHQQQQQQQQQLLLLLLLLVVVVVVVEEEEEEEEENNNNNNNNSSSSSSDDDDDDDDEEEEEEEEETTTTTTTFFFFFFFFFFFCCCCCCIIIIIIIIDDDDDDDDNNNNNNNNEEEEEEEEEAAAAALLLLLLLLYYYYYYYYYYYYDDDDDDDDIIIIIIIICCCCCCMMMMMMMMRRRRRRRRRRRTTTTTTTLLLLLLLLKKKKKKKKKLLLLLLLLNNNNNNNNNNNNNNNNPPPPPPPAAAAAYYYYYYYYYYYYGGGGDDDDDDDDLLLLLLLLNNNNNNNNYYYYYYYYYYYYLLLLLLLLVVVVVVVSSSSSSAAAAAVVVVVVVMMMMMMMMSSSSSSGGGGIIIIIIIITTTTTTTTTTTTTTCCCCCCLLLLLLLLRRRRRRRRRRRFFFFFFFFFFFPPPPPPPGGGGQQQQQQQQQLLLLLLLLNNNNNNNNSSSSSSDDDDDDDDLLLLLLLLRRRRRRRRRRRKKKKKKKKKLLLLLLLLAAAAAVVVVVVVNNNNNNNNMMMMMMMMVVVVVVVPPPPPPPFFFFFFFFFFFPPPPPPPRRRRRRRRRRRLLLLLLLLHHHHHHHHHHFFFFFFFFFFFFFFFFFFFFFFMMMMMMMMVVVVVVVGGGGFFFFFFFFFFFAAAAAPPPPPPPLLLLLLLLTTTTTTTSSSSSSPPPPPPPGGGGAAAAAHHHHHHHHHHSSSSSSFFFFFFFFFFFRRRRRRRRRRRAAAAAVVVVVVVTTTTTTTVVVVVVVPPPPPPPEEEEEEEEELLLLLLLLTTTTTTTQQQQQQQQQQQQQQQQQQMMMMMMMMFFFFFFFFFFFDDDDDDDDPPPPPPPKKKKKKKKKNNNNNNNNMMMMMMMMMMMMMMMMAAAAAAAAAASSSSSSDDDDDDDDFFFFFFFFFFFRRRRRRRRRRRNNNNNNNNGGGGRRRRRRRRRRRYYYYYYYYYYYYLLLLLLLLTTTTTTTCCCCCCCCCCCCSSSSSSIIIIIIIIFFFFFFFFFFFRRRRRRRRRRRGGGGKKKKKKKKKVVVVVVVAAAAAMMMMMMMMKKKKKKKKKEEEEEEEEEVVVVVVVEEEEEEEEEDDDDDDDDQQQQQQQQQMMMMMMMMRRRRRRRRRRRNNNNNNNNVVVVVVVQQQQQQQQQNNNNNNNNKKKKKKKKKNNNNNNNNSSSSSSTTTTTTTYYYYYYYYYYYYFFFFFFFFFFFVVVVVVVEEEEEEEEEWWWWWWWWWWWWWWIIIIIIIIPPPPPPPNNNNNNNNNNNNNNNNIIIIIIIIQQQQQQQQQTTTTTTTAAAAALLLLLLLLCCCCCCAAAAAIIIIIIIIPPPPPPPPPPPPPPRRRRRRRRRRRGGGGLLLLLLLLKKKKKKKKKMMMMMMMMSSSSSSSSSSSSTTTTTTTFFFFFFFFFFFIIIIIIIIGGGGNNNNNNNNSSSSSSTTTTTTTSSSSSSIIIIIIIIQQQQQQQQQEEEEEEEEELLLLLLLLFFFFFFFFFFFKKKKKKKKKRRRRRRRRRRRVVVVVVVGGGGEEEEEEEEEQQQQQQQQQFFFFFFFFFFFSSSSSSAAAAAMMMMMMMMFFFFFFFFFFFRRRRRRRRRRRRRRRRRRRRRRKKKKKKKKKAAAAAFFFFFFFFFFFLLLLLLLLHHHHHHHHHHWWWWWWWWWWWWWWYYYYYYYYYYYYTTTTTTTGGGGEEEEEEEEEGGGGMMMMMMMMDDDDDDDDEEEEEEEEEMMMMMMMMEEEEEEEEEFFFFFFFFFFFTTTTTTTEEEEEEEEEAAAAAEEEEEEEEESSSSSSNNNNNNNNMMMMMMMMNNNNNNNNDDDDDDDDLLLLLLLLVVVVVVVSSSSSSEEEEEEEEEYYYYYYYYYYYYQQQQQQQQQQQQQQQQQQYYYYYYYYYYYYQQQQQQQQQEEEEEEEEEAAAAAGGGGIIIIIIIIDDDDDDDDEEEEEEEEEEEEEEEEEEEEEEEEEEEEEEEEEEEEYYYYYYYYYYYYEEEEEEEEEDDDDDDDDEEEEEEEEEAAAAAPPPPPPPMMMMMMMMEEEEEEEEEAAAAAEEEEEEEEEEEEEEEEEEE

SEQ ID NO: 161 - protein, 3516 aa, Triticum aestivum
MMMMMMMMRRRRRRRRRRREEEEEEEEEIIIIIIIILLLLLLLLHHHHHHHHHHIIIIIIIIQQQQQQQQQGGGGGGGGQQQQQQQQQCCCCCCGGGGNNNNNNNNQQQQQQQQQIIIIIIIIGGGGAAAAAKKKKKKKKKFFFFFFFFFFFWWWWWWWWWWWWWWEEEEEEEEEVVVVVVVVVVVVVVCCCCCCDDDDDDDDEEEEEEEEEHHHHHHHHHHGGGGIIIIIIIIDDDDDDDDPPPPPPPTTTTTTTGGGGRRRRRRRRRRRYYYYYYYYYYYYTTTTTTTGGGGTTTTTTTSSSSSSDDDDDDDDLLLLLLLLQQQQQQQQQLLLLLLLLEEEEEEEEERRRRRRRRRRRVVVVVVVNNNNNNNNVVVVVVVYYYYYYYYYYYYYYYYYYYYYYYYNNNNNNNNEEEEEEEEEAAAAASSSSSSCCCCCCGGGGRRRRRRRRRRRFFFFFFFFFFFVVVVVVVPPPPPPPRRRRRRRRRRRAAAAAVVVVVVVLLLLLLLLMMMMMMMMDDDDDDDDLLLLLLLLEEEEEEEEEPPPPPPPGGGGTTTTTTTMMMMMMMMDDDDDDDDSSSSSSVVVVVVVRRRRRRRRRRRTTTTTTTGGGGPPPPPPPYYYYYYYYYYYYGGGGQQQQQQQQQIIIIIIIIFFFFFFFFFFFRRRRRRRRRRRPPPPPPPDDDDDDDDNNNNNNNNFFFFFFFFFFFVVVVVVVFFFFFFFFFFFGGGGQQQQQQQQQSSSSSSGGGGAAAAAGGGGNNNNNNNNNNNNNNNNWWWWWWWWWWWWWWAAAAAKKKKKKKKKGGGGHHHHHHHHHHYYYYYYYYYYYYTTTTTTTEEEEEEEEEGGGGAAAAAEEEEEEEEELLLLLLLLIIIIIIIIDDDDDDDDSSSSSSVVVVVVVLLLLLLLLDDDDDDDDVVVVVVVVVVVVVVRRRRRRRRRRRKKKKKKKKKEEEEEEEEEAAAAAEEEEEEEEENNNNNNNNCCCCCCDDDDDDDDCCCCCCLLLLLLLLQQQQQQQQQGGGGFFFFFFFFFFFQQQQQQQQQVVVVVVVCCCCCCHHHHHHHHHHSSSSSSLLLLLLLLGGGGGGGGGGGGTTTTTTTGGGGSSSSSSGGGGMMMMMMMMGGGGTTTTTTTLLLLLLLLLLLLLLLLIIIIIIIISSSSSSKKKKKKKKKIIIIIIIIRRRRRRRRRRREEEEEEEEEEEEEEEEEEYYYYYYYYYYYYPPPPPPPDDDDDDDDRRRRRRRRRRRMMMMMMMMMMMMMMMMLLLLLLLLTTTTTTTFFFFFFFFFFFSSSSSSVVVVVVVFFFFFFFFFFFPPPPPPPSSSSSSPPPPPPPKKKKKKKKKVVVVVVVSSSSSSDDDDDDDDTTTTTTTVVVVVVVVVVVVVVEEEEEEEEEPPPPPPPYYYYYYYYYYYYNNNNNNNNAAAAATTTTTTTLLLLLLLLSSSSSSVVVVVVVHHHHHHHHHHQQQQQQQQQLLLLLLLLVVVVVVVEEEEEEEEENNNNNNNNAAAAADDDDDDDDEEEEEEEEECCCCCCMMMMMMMMVVVVVVVLLLLLLLLDDDDDDDDNNNNNNNNEEEEEEEEEAAAAALLLLLLLLYYYYYYYYYYYYDDDDDDDDIIIIIIIICCCCCCFFFFFFFFFFFRRRRRRRRRRRTTTTTTTLLLLLLLLKKKKKKKKKLLLLLLLLTTTTTTTTTTTTTTPPPPPPPSSSSSSFFFFFFFFFFFGGGGDDDDDDDDLLLLLLLLNNNNNNNNHHHHHHHHHHLLLLLLLLIIIIIIIISSSSSSAAAAATTTTTTTMMMMMMMMSSSSSSGGGGVVVVVVVTTTTTTTCCCCCCCCCCCCLLLLLLLLRRRRRRRRRRRFFFFFFFFFFFPPPPPPPGGGGQQQQQQQQQLLLLLLLLNNNNNNNNSSSSSSDDDDDDDDLLLLLLLLRRRRRRRRRRRKKKKKKKKKLLLLLLLLAAAAAVVVVVVVNNNNNNNNLLLLLLLLIIIIIIIIPPPPPPPFFFFFFFFFFFPPPPPPPRRRRRRRRRRRLLLLLLLLHHHHHHHHHHFFFFFFFFFFFFFFFFFFFFFFMMMMMMMMVVVVVVVGGGGFFFFFFFFFFFAAAAAPPPPPPPLLLLLLLLTTTTTTTSSSSSSRRRRRRRRRRRGGGGSSSSSSQQQQQQQQQQQQQQQQQQYYYYYYYYYYYYRRRRRRRRRRRAAAAALLLLLLLLTTTTTTTVVVVVVVPPPPPPPEEEEEEEEELLLLLLLLTTTTTTTQQQQQQQQQQQQQQQQQQMMMMMMMMWWWWWWWWWWWWWWDDDDDDDDAAAAAKKKKKKKKKNNNNNNNNMMMMMMMMMMMMMMMMCCCCCCAAAAAAAAAADDDDDDDDPPPPPPPRRRRRRRRRRRHHHHHHHHHHGGGGRRRRRRRRRRRYYYYYYYYYYYYLLLLLLLLTTTTTTTAAAAASSSSSSAAAAAMMMMMMMMFFFFFFFFFFFRRRRRRRRRRRGGGGKKKKKKKKKMMMMMMMMSSSSSSTTTTTTTKKKKKKKKKEEEEEEEEEVVVVVVVDDDDDDDDEEEEEEEEEQQQQQQQQQMMMMMMMMIIIIIIIINNNNNNNNVVVVVVVQQQQQQQQQNNNNNNNNKKKKKKKKKNNNNNNNNSSSSSSSSSSSSYYYYYYYYYYYYFFFFFFFFFFFVVVVVVVEEEEEEEEEWWWWWWWWWWWWWWIIIIIIIIPPPPPPPNNNNNNNNNNNNNNNNVVVVVVVKKKKKKKKKSSSSSSSSSSSSVVVVVVVCCCCCCDDDDDDDDIIIIIIIIPPPPPPPPPPPPPPTTTTTTTGGGGLLLLLLLLSSSSSSMMMMMMMMAAAAASSSSSSTTTTTTTFFFFFFFFFFFVVVVVVVGGGGNNNNNNNNSSSSSSTTTTTTTSSSSSSIIIIIIIIQQQQQQQQQEEEEEEEEEMMMMMMMMFFFFFFFFFFFRRRRRRRRRRRRRRRRRRRRRRVVVVVVVSSSSSSEEEEEEEEEQQQQQQQQQFFFFFFFFFFFTTTTTTTSSSSSSMMMMMMMMFFFFFFFFFFFRRRRRRRRRRRRRRRRRRRRRRKKKKKKKKKAAAAAFFFFFFFFFFFLLLLLLLLHHHHHHHHHHWWWWWWWWWWWWWWYYYYYYYYYYYYTTTTTTTGGGGEEEEEEEEEGGGGMMMMMMMMDDDDDDDDEEEEEEEEEMMMMMMMMEEEEEEEEEFFFFFFFFFFFTTTTTTTEEEEEEEEEAAAAAEEEEEEEEESSSSSSNNNNNNNNMMMMMMMMNNNNNNNNDDDDDDDDLLLLLLLLVVVVVVVSSSSSSEEEEEEEEEYYYYYYYYYYYYQQQQQQQQQQQQQQQQQQYYYYYYYYYYYYQQQQQQQQQDDDDDDDDAAAAATTTTTTTSSSSSSDDDDDDDDEEEEEEEEEEEEEEEEEEGGGGEEEEEEEEEYYYYYYYYYYYYEEEEEEEEEDDDDDDDDEEEEEEEEEDDDDDDDDQQQQQQQQQEEEEEEEEEPPPPPPPEEEEEEEEEEEEEEEEEEDDDDDDDDMMMMMMMMM

SEQ ID NO: 162 - protein, 3487 aa, Xenopus laevis
MMMMMMMMRRRRRRRRRRREEEEEEEEEIIIIIIIIVVVVVVVHHHHHHHHHHLLLLLLLLQQQQQQQQQAAAAAGGGGQQQQQQQQQCCCCCCGGGGNNNNNNNNQQQQQQQQQIIIIIIIIGGGGAAAAAKKKKKKKKKFFFFFFFFFFFWWWWWWWWWWWWWWEEEEEEEEEVVVVVVVIIIIIIIISSSSSSDDDDDDDDEEEEEEEEEHHHHHHHHHHGGGGIIIIIIIIDDDDDDDDPPPPPPPTTTTTTTGGGGSSSSSSYYYYYYYYYYYYHHHHHHHHHHGGGGDDDDDDDDSSSSSSDDDDDDDDLLLLLLLLQQQQQQQQQLLLLLLLLEEEEEEEEERRRRRRRRRRRIIIIIIIINNNNNNNNVVVVVVVYYYYYYYYYYYYYYYYYYYYYYYYNNNNNNNNEEEEEEEEEAAAAATTTTTTTGGGGNNNNNNNNKKKKKKKKKFFFFFFFFFFFVVVVVVVPPPPPPPRRRRRRRRRRRAAAAAIIIIIIIILLLLLLLLVVVVVVVDDDDDDDDLLLLLLLLEEEEEEEEEPPPPPPPGGGGTTTTTTTMMMMMMMMDDDDDDDDSSSSSSVVVVVVVRRRRRRRRRRRSSSSSSGGGGPPPPPPPFFFFFFFFFFFGGGGQQQQQQQQQIIIIIIIIFFFFFFFFFFFRRRRRRRRRRRPPPPPPPDDDDDDDDNNNNNNNNFFFFFFFFFFFVVVVVVVFFFFFFFFFFFGGGGQQQQQQQQQSSSSSSGGGGAAAAAGGGGNNNNNNNNNNNNNNNNWWWWWWWWWWWWWWAAAAAKKKKKKKKKGGGGHHHHHHHHHHYYYYYYYYYYYYTTTTTTTEEEEEEEEEGGGGAAAAAEEEEEEEEELLLLLLLLVVVVVVVDDDDDDDDSSSSSSVVVVVVVLLLLLLLLDDDDDDDDVVVVVVVVVVVVVVRRRRRRRRRRRKKKKKKKKKEEEEEEEEESSSSSSEEEEEEEEESSSSSSCCCCCCDDDDDDDDCCCCCCLLLLLLLLQQQQQQQQQGGGGFFFFFFFFFFFQQQQQQQQQLLLLLLLLTTTTTTTHHHHHHHHHHSSSSSSLLLLLLLLGGGGGGGGGGGGTTTTTTTGGGGSSSSSSGGGGMMMMMMMMGGGGTTTTTTTLLLLLLLLLLLLLLLLIIIIIIIISSSSSSKKKKKKKKKIIIIIIIIRRRRRRRRRRREEEEEEEEEEEEEEEEEEYYYYYYYYYYYYPPPPPPPDDDDDDDDRRRRRRRRRRRIIIIIIIIMMMMMMMMNNNNNNNNTTTTTTTFFFFFFFFFFFSSSSSSVVVVVVVMMMMMMMMPPPPPPPSSSSSSPPPPPPPKKKKKKKKKVVVVVVVSSSSSSDDDDDDDDTTTTTTTVVVVVVVVVVVVVVEEEEEEEEEPPPPPPPYYYYYYYYYYYYNNNNNNNNAAAAATTTTTTTLLLLLLLLSSSSSSVVVVVVVHHHHHHHHHHQQQQQQQQQLLLLLLLLVVVVVVVEEEEEEEEENNNNNNNNTTTTTTTDDDDDDDDEEEEEEEEETTTTTTTYYYYYYYYYYYYCCCCCCIIIIIIIIDDDDDDDDNNNNNNNNEEEEEEEEEAAAAALLLLLLLLYYYYYYYYYYYYDDDDDDDDIIIIIIIICCCCCCFFFFFFFFFFFRRRRRRRRRRRTTTTTTTLLLLLLLLKKKKKKKKKLLLLLLLLTTTTTTTTTTTTTTPPPPPPPTTTTTTTYYYYYYYYYYYYGGGGDDDDDDDDLLLLLLLLNNNNNNNNHHHHHHHHHHLLLLLLLLVVVVVVVSSSSSSAAAAATTTTTTTMMMMMMMMSSSSSSGGGGVVVVVVVTTTTTTTTTTTTTTCCCCCCLLLLLLLLRRRRRRRRRRRFFFFFFFFFFFPPPPPPPGGGGQQQQQQQQQLLLLLLLLNNNNNNNNAAAAADDDDDDDDLLLLLLLLRRRRRRRRRRRKKKKKKKKKLLLLLLLLAAAAAVVVVVVVNNNNNNNNMMMMMMMMVVVVVVVPPPPPPPFFFFFFFFFFFPPPPPPPRRRRRRRRRRRLLLLLLLLHHHHHHHHHHFFFFFFFFFFFFFFFFFFFFFFMMMMMMMMPPPPPPPGGGGFFFFFFFFFFFAAAAAPPPPPPPLLLLLLLLTTTTTTTSSSSSSRRRRRRRRRRRGGGGSSSSSSQQQQQQQQQQQQQQQQQQYYYYYYYYYYYYRRRRRRRRRRRAAAAALLLLLLLLTTTTTTTVVVVVVVPPPPPPPEEEEEEEEELLLLLLLLTTTTTTTQQQQQQQQQQQQQQQQQQMMMMMMMMFFFFFFFFFFFDDDDDDDDSSSSSSKKKKKKKKKNNNNNNNNMMMMMMMMMMMMMMMMAAAAAAAAAACCCCCCDDDDDDDDPPPPPPPRRRRRRRRRRRHHHHHHHHHHGGGGRRRRRRRRRRRYYYYYYYYYYYYLLLLLLLLTTTTTTTVVVVVVVAAAAAAAAAAIIIIIIIIFFFFFFFFFFFRRRRRRRRRRRGGGGRRRRRRRRRRRMMMMMMMMSSSSSSMMMMMMMMKKKKKKKKKEEEEEEEEEVVVVVVVDDDDDDDDEEEEEEEEEQQQQQQQQQMMMMMMMMLLLLLLLLNNNNNNNNVVVVVVVQQQQQQQQQNNNNNNNNKKKKKKKKKSSSSSSSSSSSSSSSSSSYYYYYYYYYYYYFFFFFFFFFFFVVVVVVVEEEEEEEEEWWWWWWWWWWWWWWIIIIIIIIPPPPPPPNNNNNNNNNNNNNNNNVVVVVVVKKKKKKKKKTTTTTTTAAAAAVVVVVVVCCCCCCDDDDDDDDIIIIIIIIPPPPPPPPPPPPPPRRRRRRRRRRRGGGGLLLLLLLLKKKKKKKKKMMMMMMMMSSSSSSAAAAATTTTTTTFFFFFFFFFFFIIIIIIIIGGGGNNNNNNNNSSSSSSTTTTTTTAAAAAIIIIIIIIQQQQQQQQQEEEEEEEEELLLLLLLLFFFFFFFFFFFKKKKKKKKKRRRRRRRRRRRIIIIIIIISSSSSSEEEEEEEEEQQQQQQQQQFFFFFFFFFFFTTTTTTTAAAAAMMMMMMMMFFFFFFFFFFFRRRRRRRRRRRRRRRRRRRRRRKKKKKKKKKAAAAAFFFFFFFFFFFLLLLLLLLHHHHHHHHHHWWWWWWWWWWWWWWYYYYYYYYYYYYTTTTTTTGGGGEEEEEEEEEGGGGMMMMMMMMDDDDDDDDEEEEEEEEEMMMMMMMMEEEEEEEEEFFFFFFFFFFFTTTTTTTEEEEEEEEEAAAAAEEEEEEEEESSSSSSNNNNNNNNMMMMMMMMNNNNNNNNDDDDDDDDLLLLLLLLVVVVVVVSSSSSSEEEEEEEEEYYYYYYYYYYYYQQQQQQQQQQQQQQQQQQYYYYYYYYYYYYQQQQQQQQQDDDDDDDDAAAAATTTTTTTAAAAADDDDDDDDEEEEEEEEEQQQQQQQQQGGGGEEEEEEEEEFFFFFFFFFFFEEEEEEEEEEEEEEEEEEEEEEEEEEEEEEEEEEEEDDDDDDDDEEEEEEEEEAAAAAA

SEQ ID NO: 163 - protein, 1913 aa, Anemia phyllitidis
EEEEEEEEEAAAAALLLLLLLLYYYYYYYYYYYYDDDDDDDDIIIIIIIICCCCCCFFFFFFFFFFFRRRRRRRRRRRTTTTTTTLLLLLLLLKKKKKKKKKLLLLLLLLVVVVVVVTTTTTTTPPPPPPPTTTTTTTFFFFFFFFFFFGGGGDDDDDDDDLLLLLLLLNNNNNNNNHHHHHHHHHHLLLLLLLLIIIIIIIISSSSSSAAAAATTTTTTTMMMMMMMMSSSSSSGGGGVVVVVVVTTTTTTTCCCCCCCCCCCCLLLLLLLLRRRRRRRRRRRFFFFFFFFFFFPPPPPPPGGGGQQQQQQQQQLLLLLLLLNNNNNNNNSSSSSSDDDDDDDDLLLLLLLLRRRRRRRRRRRKKKKKKKKKLLLLLLLLAAAAAVVVVVVVNNNNNNNNLLLLLLLLIIIIIIIIPPPPPPPFFFFFFFFFFFPPPPPPPRRRRRRRRRRRLLLLLLLLHHHHHHHHHHFFFFFFFFFFFFFFFFFFFFFFMMMMMMMMVVVVVVVGGGGFFFFFFFFFFFAAAAAPPPPPPPLLLLLLLLTTTTTTTSSSSSSRRRRRRRRRRRGGGGSSSSSSQQQQQQQQQQQQQQQQQQYYYYYYYYYYYYRRRRRRRRRRRAAAAALLLLLLLLTTTTTTTVVVVVVVPPPPPPPEEEEEEEEELLLLLLLLTTTTTTTQQQQQQQQQQQQQQQQQQMMMMMMMMWWWWWWWWWWWWWWDDDDDDDDAAAAAKKKKKKKKKNNNNNNNNMMMMMMMMMMMMMMMMCCCCCCAAAAAAAAAADDDDDDDDPPPPPPPRRRRRRRRRRRHHHHHHHHHHGGGGRRRRRRRRRRRYYYYYYYYYYYYLLLLLLLLTTTTTTTAAAAASSSSSSAAAAAMMMMMMMMFFFFFFFFFFFRRRRRRRRRRRGGGGKKKKKKKKKMMMMMMMMSSSSSSTTTTTTTKKKKKKKKKEEEEEEEEEVVVVVVVDDDDDDDDEEEEEEEEEQQQQQQQQQLLLLLLLLIIIIIIIINNNNNNNNVVVVVVVQQQQQQQQQNNNNNNNNKKKKKKKKKNNNNNNNNSSSSSSSSSSSSYYYYYYYYYYYYFFFFFFFFFFFVVVVVVVEEEEEEEEEWWWWWWWWWWWWWWIIIIIIIIPPPPPPPNNNNNNNNNNNNNNNNVVVVVVVKKKKKKKKKSSSSSSSSSSSSVVVVVVVCCCCCCDDDDDDDDIIIIIIIIPPPPPPPPPPPPPPVVVVVVVGGGGLLLLLLLLKKKKKKKKKMMMMMMMMAAAAACCCCCCTTTTTTTFFFFFFFFFFFIIIIIIIIGGGGNNNNNNNNSSSSSSSSSSSSSSSSSSIIIIIIIIQQQQQQQQQEEEEEEEEEMMMMMMMMFFFFFFFFFFFRRRRRRRRRRRRRRRRRRRRRRDDDDDDDDAAAAATTTTTTTSSSSSSLLLLLLLLTTTTTTTAAAAAMMMMMMMMFFFFFFFFFFFRRRRRRRRRRRRRRRRRRRRRRKKKKKKKKKAAAAAFFFFFFFFFFFLLLLLLLLHHHHHHHHHHWWWWWWWWWWWWWWYYYYYYYYYYYYTTTTTTTWWWWWWWWWWWWWWEEEEEEEEEGGGGMMMMMMMMDDDDDDDDEEEEEEEEEMMMMMMMMEEEEEEEEEFFFFFFFFFFFTTTTTTTEEEEEEEEEEEEEEEEEEEEEEEEEEESSSSSSNNNNNNNNMMMMMMMMNNNNNNNNDDDDDDDDLLLLLLLLVVVVVVVSSSSSSEEEEEEEEEYYYYYYYYYYYYQQQQQQQQQQQQQQQQQQYYYYYYYYYYYYQQQQQQQQQDDDDDDDDAAAAASSSSSSAAAAAEEEEEEEEEPPPPPPPGGGGGGGGEEEEEEEEEQQQQQQQQQEEEEEEEEEEEEEEEEEEDDDDDDDDYYYYYYYYYYYYEEEEEEEEEEEEEEEEEEAAAAAA

SEQ ID NO: 164 - protein, 3498 aa, Gallus gallus
MMMMMMMMRRRRRRRRRRREEEEEEEEEIIIIIIIIVVVVVVVHHHHHHHHHHLLLLLLLLQQQQQQQQQAAAAAGGGGQQQQQQQQQCCCCCCGGGGNNNNNNNNQQQQQQQQQIIIIIIIIGGGGAAAAAKKKKKKKKKFFFFFFFFFFFWWWWWWWWWWWWWWEEEEEEEEEVVVVVVVIIIIIIIISSSSSSDDDDDDDDEEEEEEEEEHHHHHHHHHHGGGGIIIIIIIIDDDDDDDDPPPPPPPTTTTTTTGGGGTTTTTTTYYYYYYYYYYYYHHHHHHHHHHGGGGDDDDDDDDSSSSSSDDDDDDDDLLLLLLLLQQQQQQQQQLLLLLLLLEEEEEEEEERRRRRRRRRRRIIIIIIIINNNNNNNNVVVVVVVYYYYYYYYYYYYYYYYYYYYYYYYNNNNNNNNEEEEEEEEEAAAAATTTTTTTGGGGGGGGKKKKKKKKKYYYYYYYYYYYYVVVVVVVPPPPPPPRRRRRRRRRRRAAAAAVVVVVVVLLLLLLLLVVVVVVVDDDDDDDDLLLLLLLLEEEEEEEEEPPPPPPPGGGGTTTTTTTMMMMMMMMDDDDDDDDSSSSSSVVVVVVVRRRRRRRRRRRSSSSSSGGGGPPPPPPPFFFFFFFFFFFRRRRRRRRRRRQQQQQQQQQIIIIIIIIFFFFFFFFFFFRRRRRRRRRRRPPPPPPPDDDDDDDDNNNNNNNNFFFFFFFFFFFVVVVVVVFFFFFFFFFFFGGGGQQQQQQQQQSSSSSSGGGGAAAAAGGGGNNNNNNNNNNNNNNNNWWWWWWWWWWWWWWAAAAAKKKKKKKKKGGGGHHHHHHHHHHYYYYYYYYYYYYTTTTTTTEEEEEEEEEGGGGAAAAAEEEEEEEEELLLLLLLLVVVVVVVDDDDDDDDSSSSSSVVVVVVVLLLLLLLLDDDDDDDDVVVVVVVVVVVVVVRRRRRRRRRRRKKKKKKKKKEEEEEEEEEAAAAAEEEEEEEEESSSSSSCCCCCCDDDDDDDDCCCCCCLLLLLLLLQQQQQQQQQGGGGFFFFFFFFFFFQQQQQQQQQLLLLLLLLTTTTTTTHHHHHHHHHHSSSSSSLLLLLLLLGGGGGGGGGGGGTTTTTTTGGGGSSSSSSGGGGMMMMMMMMGGGGTTTTTTTLLLLLLLLLLLLLLLLIIIIIIIISSSSSSKKKKKKKKKIIIIIIIIRRRRRRRRRRREEEEEEEEEEEEEEEEEEYYYYYYYYYYYYPPPPPPPDDDDDDDDRRRRRRRRRRRIIIIIIIIMMMMMMMMNNNNNNNNTTTTTTTFFFFFFFFFFFSSSSSSVVVVVVVVVVVVVVPPPPPPPSSSSSSPPPPPPPKKKKKKKKKVVVVVVVSSSSSSDDDDDDDDTTTTTTTVVVVVVVVVVVVVVEEEEEEEEEPPPPPPPYYYYYYYYYYYYNNNNNNNNAAAAATTTTTTTLLLLLLLLSSSSSSVVVVVVVHHHHHHHHHHQQQQQQQQQLLLLLLLLVVVVVVVEEEEEEEEENNNNNNNNTTTTTTTDDDDDDDDEEEEEEEEETTTTTTTYYYYYYYYYYYYCCCCCCIIIIIIIIDDDDDDDDNNNNNNNNEEEEEEEEEAAAAALLLLLLLLYYYYYYYYYYYYDDDDDDDDIIIIIIIICCCCCCFFFFFFFFFFFRRRRRRRRRRRTTTTTTTLLLLLLLLKKKKKKKKKLLLLLLLLTTTTTTTTTTTTTTPPPPPPPTTTTTTTYYYYYYYYYYYYGGGGDDDDDDDDLLLLLLLLNNNNNNNNHHHHHHHHHHLLLLLLLLVVVVVVVSSSSSSAAAAATTTTTTTMMMMMMMMSSSSSSGGGGVVVVVVVTTTTTTTTTTTTTTCCCCCCLLLLLLLLRRRRRRRRRRRFFFFFFFFFFFPPPPPPPGGGGQQQQQQQQQLLLLLLLLNNNNNNNNAAAAADDDDDDDDLLLLLLLLRRRRRRRRRRRKKKKKKKKKLLLLLLLLAAAAAVVVVVVVNNNNNNNNMMMMMMMMVVVVVVVPPPPPPPFFFFFFFFFFFPPPPPPPRRRRRRRRRRRLLLLLLLLHHHHHHHHHHFFFFFFFFFFFFFFFFFFFFFFMMMMMMMMPPPPPPPGGGGFFFFFFFFFFFAAAAAPPPPPPPLLLLLLLLTTTTTTTSSSSSSRRRRRRRRRRRGGGGSSSSSSQQQQQQQQQQQQQQQQQQYYYYYYYYYYYYRRRRRRRRRRRAAAAALLLLLLLLTTTTTTTVVVVVVVPPPPPPPDDDDDDDDLLLLLLLLTTTTTTTQQQQQQQQQQQQQQQQQQMMMMMMMMFFFFFFFFFFFDDDDDDDDAAAAAKKKKKKKKKNNNNNNNNMMMMMMMMMMMMMMMMAAAAAAAAAACCCCCCEEEEEEEEEPPPPPPPGGGGHHHHHHHHHHGGGGRRRRRRRRRRRYYYYYYYYYYYYLLLLLLLLTTTTTTTVVVVVVVAAAAAAAAAAVVVVVVVFFFFFFFFFFFRRRRRRRRRRRGGGGRRRRRRRRRRRMMMMMMMMSSSSSSMMMMMMMMKKKKKKKKKEEEEEEEEEVVVVVVVDDDDDDDDEEEEEEEEEQQQQQQQQQMMMMMMMMLLLLLLLLNNNNNNNNVVVVVVVQQQQQQQQQNNNNNNNNKKKKKKKKKNNNNNNNNSSSSSSSSSSSSYYYYYYYYYYYYFFFFFFFFFFFVVVVVVVEEEEEEEEEWWWWWWWWWWWWWWIIIIIIIIPPPPPPPNNNNNNNNNNNNNNNNVVVVVVVKKKKKKKKKTTTTTTTAAAAAVVVVVVVCCCCCCDDDDDDDDIIIIIIIIPPPPPPPPPPPPPPRRRRRRRRRRRGGGGLLLLLLLLKKKKKKKKKMMMMMMMMSSSSSSAAAAATTTTTTTFFFFFFFFFFFIIIIIIIIGGGGNNNNNNNNSSSSSSTTTTTTTAAAAAIIIIIIIIQQQQQQQQQEEEEEEEEELLLLLLLLFFFFFFFFFFFKKKKKKKKKRRRRRRRRRRRIIIIIIIISSSSSSEEEEEEEEEQQQQQQQQQFFFFFFFFFFFTTTTTTTAAAAAMMMMMMMMFFFFFFFFFFFRRRRRRRRRRRRRRRRRRRRRRKKKKKKKKKAAAAAFFFFFFFFFFFLLLLLLLLHHHHHHHHHHWWWWWWWWWWWWWWYYYYYYYYYYYYTTTTTTTGGGGEEEEEEEEEGGGGMMMMMMMMDDDDDDDDEEEEEEEEEMMMMMMMMEEEEEEEEEFFFFFFFFFFFTTTTTTTEEEEEEEEEAAAAAEEEEEEEEESSSSSSNNNNNNNNMMMMMMMMNNNNNNNNDDDDDDDDLLLLLLLLVVVVVVVSSSSSSEEEEEEEEEYYYYYYYYYYYYQQQQQQQQQQQQQQQQQQYYYYYYYYYYYYQQQQQQQQQDDDDDDDDAAAAATTTTTTTAAAAAEEEEEEEEEEEEEEEEEEEEEEEEEEEGGGGEEEEEEEEEFFFFFFFFFFFEEEEEEEEEEEEEEEEEEEEEEEEEEEAAAAAEEEEEEEEEEEEEEEEEEEEEEEEEEEAAAAAEEEEEEEEEE

SEQ ID NO: 165 - protein, 3568 aa, Drosophila melanogaster
MMMMMMMMRRRRRRRRRRREEEEEEEEEIIIIIIIIVVVVVVVHHHHHHHHHHLLLLLLLLQQQQQQQQQAAAAAGGGGQQQQQQQQQCCCCCCGGGGNNNNNNNNQQQQQQQQQIIIIIIIIGGGGAAAAAKKKKKKKKKFFFFFFFFFFFWWWWWWWWWWWWWWEEEEEEEEEIIIIIIIIIIIIIIIISSSSSSEEEEEEEEEEEEEEEEEEHHHHHHHHHHGGGGIIIIIIIIDDDDDDDDSSSSSSNNNNNNNNGGGGIIIIIIIIYYYYYYYYYYYYVVVVVVVGGGGDDDDDDDDSSSSSSDDDDDDDDLLLLLLLLQQQQQQQQQLLLLLLLLEEEEEEEEERRRRRRRRRRRVVVVVVVSSSSSSVVVVVVVYYYYYYYYYYYYYYYYYYYYYYYYNNNNNNNNEEEEEEEEEAAAAASSSSSSAAAAAVVVVVVVTTTTTTTRRRRRRRRRRRSSSSSSSSSSSSGGGGGGGGKKKKKKKKKYYYYYYYYYYYYVVVVVVVPPPPPPPRRRRRRRRRRRAAAAAIIIIIIIILLLLLLLLLLLLLLLLDDDDDDDDLLLLLLLLEEEEEEEEEPPPPPPPGGGGTTTTTTTMMMMMMMMEEEEEEEEESSSSSSVVVVVVVRRRRRRRRRRRSSSSSSGGGGPPPPPPPYYYYYYYYYYYYGGGGQQQQQQQQQLLLLLLLLFFFFFFFFFFFRRRRRRRRRRRPPPPPPPDDDDDDDDNNNNNNNNFFFFFFFFFFFVVVVVVVYYYYYYYYYYYYGGGGQQQQQQQQQSSSSSSGGGGAAAAAGGGGNNNNNNNNNNNNNNNNWWWWWWWWWWWWWWAAAAAKKKKKKKKKGGGGHHHHHHHHHHYYYYYYYYYYYYTTTTTTTEEEEEEEEEGGGGAAAAAEEEEEEEEELLLLLLLLVVVVVVVDDDDDDDDNNNNNNNNVVVVVVVLLLLLLLLDDDDDDDDVVVVVVVVVVVVVVRRRRRRRRRRRKKKKKKKKKEEEEEEEEECCCCCCEEEEEEEEENNNNNNNNCCCCCCDDDDDDDDCCCCCCLLLLLLLLQQQQQQQQQGGGGFFFFFFFFFFFQQQQQQQQQLLLLLLLLTTTTTTTHHHHHHHHHHSSSSSSLLLLLLLLGGGGGGGGGGGGTTTTTTTGGGGSSSSSSGGGGMMMMMMMMGGGGTTTTTTTLLLLLLLLLLLLLLLLIIIIIIIISSSSSSKKKKKKKKKIIIIIIIIRRRRRRRRRRREEEEEEEEEEEEEEEEEEYYYYYYYYYYYYPPPPPPPDDDDDDDDRRRRRRRRRRRIIIIIIIIMMMMMMMMNNNNNNNNTTTTTTTYYYYYYYYYYYYSSSSSSVVVVVVVVVVVVVVPPPPPPPSSSSSSPPPPPPPKKKKKKKKKVVVVVVVSSSSSSDDDDDDDDTTTTTTTVVVVVVVVVVVVVVEEEEEEEEEPPPPPPPYYYYYYYYYYYYNNNNNNNNAAAAATTTTTTTLLLLLLLLSSSSSSIIIIIIIIHHHHHHHHHHQQQQQQQQQLLLLLLLLVVVVVVVEEEEEEEEENNNNNNNNTTTTTTTDDDDDDDDEEEEEEEEETTTTTTTYYYYYYYYYYYYCCCCCCIIIIIIIIDDDDDDDDNNNNNNNNEEEEEEEEEAAAAALLLLLLLLYYYYYYYYYYYYDDDDDDDDIIIIIIIICCCCCCFFFFFFFFFFFRRRRRRRRRRRTTTTTTTLLLLLLLLKKKKKKKKKVVVVVVVSSSSSSNNNNNNNNPPPPPPPSSSSSSYYYYYYYYYYYYGGGGDDDDDDDDLLLLLLLLNNNNNNNNHHHHHHHHHHLLLLLLLLVVVVVVVSSSSSSLLLLLLLLTTTTTTTMMMMMMMMSSSSSSGGGGVVVVVVVTTTTTTTTTTTTTTCCCCCCLLLLLLLLRRRRRRRRRRRFFFFFFFFFFFPPPPPPPGGGGQQQQQQQQQLLLLLLLLNNNNNNNNAAAAADDDDDDDDLLLLLLLLRRRRRRRRRRRKKKKKKKKKLLLLLLLLAAAAAVVVVVVVNNNNNNNNMMMMMMMMVVVVVVVPPPPPPPFFFFFFFFFFFPPPPPPPRRRRRRRRRRRLLLLLLLLHHHHHHHHHHFFFFFFFFFFFFFFFFFFFFFFMMMMMMMMPPPPPPPGGGGFFFFFFFFFFFAAAAAPPPPPPPLLLLLLLLTTTTTTTSSSSSSRRRRRRRRRRRGGGGSSSSSSQQQQQQQQQQQQQQQQQQYYYYYYYYYYYYRRRRRRRRRRRAAAAALLLLLLLLTTTTTTTVVVVVVVPPPPPPPEEEEEEEEELLLLLLLLTTTTTTTQQQQQQQQQQQQQQQQQQMMMMMMMMFFFFFFFFFFFDDDDDDDDAAAAAKKKKKKKKKNNNNNNNNMMMMMMMMMMMMMMMMAAAAAAAAAACCCCCCDDDDDDDDPPPPPPPRRRRRRRRRRRHHHHHHHHHHGGGGRRRRRRRRRRRYYYYYYYYYYYYLLLLLLLLTTTTTTTVVVVVVVAAAAAAAAAAVVVVVVVFFFFFFFFFFFRRRRRRRRRRRGGGGRRRRRRRRRRRMMMMMMMMSSSSSSMMMMMMMMKKKKKKKKKEEEEEEEEEVVVVVVVDDDDDDDDEEEEEEEEEQQQQQQQQQMMMMMMMMLLLLLLLLAAAAAVVVVVVVQQQQQQQQQNNNNNNNNKKKKKKKKKNNNNNNNNSSSSSSSSSSSSYYYYYYYYYYYYFFFFFFFFFFFVVVVVVVEEEEEEEEEWWWWWWWWWWWWWWIIIIIIIIPPPPPPPNNNNNNNNNNNNNNNNVVVVVVVKKKKKKKKKTTTTTTTAAAAAVVVVVVVCCCCCCDDDDDDDDIIIIIIIIPPPPPPPPPPPPPPRRRRRRRRRRRGGGGLLLLLLLLKKKKKKKKKMMMMMMMMSSSSSSSSSSSSTTTTTTTFFFFFFFFFFFIIIIIIIIGGGGNNNNNNNNTTTTTTTTTTTTTTAAAAAIIIIIIIIQQQQQQQQQEEEEEEEEELLLLLLLLFFFFFFFFFFFKKKKKKKKKRRRRRRRRRRRIIIIIIIISSSSSSEEEEEEEEEQQQQQQQQQFFFFFFFFFFFSSSSSSAAAAAMMMMMMMMFFFFFFFFFFFRRRRRRRRRRRRRRRRRRRRRRKKKKKKKKKAAAAAFFFFFFFFFFFLLLLLLLLHHHHHHHHHHWWWWWWWWWWWWWWYYYYYYYYYYYYTTTTTTTGGGGEEEEEEEEEGGGGMMMMMMMMDDDDDDDDEEEEEEEEEMMMMMMMMEEEEEEEEEFFFFFFFFFFFTTTTTTTEEEEEEEEEAAAAAEEEEEEEEESSSSSSNNNNNNNNMMMMMMMMNNNNNNNNDDDDDDDDLLLLLLLLVVVVVVVSSSSSSEEEEEEEEEYYYYYYYYYYYYQQQQQQQQQQQQQQQQQQYYYYYYYYYYYYQQQQQQQQQEEEEEEEEEAAAAATTTTTTTAAAAADDDDDDDDDDDDDDDDEEEEEEEEEFFFFFFFFFFFDDDDDDDDPPPPPPPEEEEEEEEEVVVVVVVNNNNNNNNQQQQQQQQQEEEEEEEEEEEEEEEEEEVVVVVVVEEEEEEEEEGGGGDDDDDDDDCCCCCCIIIIIIIII

SEQ ID NO: 166 - protein, 3508 aa, Eleusine indica
MMMMMMMMRRRRRRRRRRREEEEEEEEEIIIIIIIILLLLLLLLHHHHHHHHHHIIIIIIIIQQQQQQQQQGGGGGGGGQQQQQQQQQCCCCCCGGGGNNNNNNNNQQQQQQQQQIIIIIIIIGGGGAAAAAKKKKKKKKKFFFFFFFFFFFWWWWWWWWWWWWWWEEEEEEEEEVVVVVVVIIIIIIIICCCCCCDDDDDDDDEEEEEEEEEHHHHHHHHHHGGGGIIIIIIIIDDDDDDDDHHHHHHHHHHTTTTTTTGGGGKKKKKKKKKYYYYYYYYYYYYAAAAAGGGGDDDDDDDDSSSSSSDDDDDDDDLLLLLLLLQQQQQQQQQLLLLLLLLEEEEEEEEERRRRRRRRRRRIIIIIIIINNNNNNNNVVVVVVVYYYYYYYYYYYYYYYYYYYYYYYYNNNNNNNNEEEEEEEEEAAAAAGGGGGGGGGGGGRRRRRRRRRRRFFFFFFFFFFFVVVVVVVPPPPPPPRRRRRRRRRRRAAAAAVVVVVVVLLLLLLLLMMMMMMMMDDDDDDDDLLLLLLLLEEEEEEEEEPPPPPPPGGGGTTTTTTTMMMMMMMMDDDDDDDDSSSSSSLLLLLLLLRRRRRRRRRRRSSSSSSGGGGPPPPPPPYYYYYYYYYYYYGGGGQQQQQQQQQIIIIIIIIFFFFFFFFFFFRRRRRRRRRRRPPPPPPPDDDDDDDDNNNNNNNNFFFFFFFFFFFVVVVVVVFFFFFFFFFFFGGGGQQQQQQQQQSSSSSSGGGGAAAAAGGGGNNNNNNNNNNNNNNNNWWWWWWWWWWWWWWAAAAAKKKKKKKKKGGGGHHHHHHHHHHYYYYYYYYYYYYTTTTTTTEEEEEEEEEGGGGAAAAAEEEEEEEEELLLLLLLLIIIIIIIIDDDDDDDDSSSSSSVVVVVVVLLLLLLLLDDDDDDDDVVVVVVVVVVVVVVRRRRRRRRRRRKKKKKKKKKEEEEEEEEEAAAAAEEEEEEEEENNNNNNNNCCCCCCDDDDDDDDCCCCCCLLLLLLLLQQQQQQQQQGGGGFFFFFFFFFFFQQQQQQQQQVVVVVVVCCCCCCHHHHHHHHHHSSSSSSLLLLLLLLGGGGGGGGGGGGTTTTTTTGGGGSSSSSSGGGGMMMMMMMMGGGGTTTTTTTLLLLLLLLLLLLLLLLIIIIIIIISSSSSSKKKKKKKKKIIIIIIIIRRRRRRRRRRREEEEEEEEEEEEEEEEEEYYYYYYYYYYYYPPPPPPPDDDDDDDDRRRRRRRRRRRMMMMMMMMMMMMMMMMLLLLLLLLTTTTTTTFFFFFFFFFFFSSSSSSVVVVVVVFFFFFFFFFFFPPPPPPPSSSSSSPPPPPPPKKKKKKKKKVVVVVVVSSSSSSDDDDDDDDTTTTTTTVVVVVVVVVVVVVVEEEEEEEEEPPPPPPPYYYYYYYYYYYYNNNNNNNNAAAAATTTTTTTLLLLLLLLSSSSSSVVVVVVVHHHHHHHHHHQQQQQQQQQLLLLLLLLVVVVVVVEEEEEEEEENNNNNNNNAAAAADDDDDDDDEEEEEEEEECCCCCCMMMMMMMMVVVVVVVLLLLLLLLDDDDDDDDNNNNNNNNEEEEEEEEEAAAAALLLLLLLLYYYYYYYYYYYYDDDDDDDDIIIIIIIICCCCCCFFFFFFFFFFFRRRRRRRRRRRTTTTTTTLLLLLLLLKKKKKKKKKLLLLLLLLAAAAATTTTTTTPPPPPPPTTTTTTTFFFFFFFFFFFGGGGDDDDDDDDLLLLLLLLNNNNNNNNHHHHHHHHHHLLLLLLLLIIIIIIIISSSSSSAAAAATTTTTTTMMMMMMMMSSSSSSGGGGVVVVVVVTTTTTTTCCCCCCCCCCCCLLLLLLLLRRRRRRRRRRRFFFFFFFFFFFPPPPPPPGGGGQQQQQQQQQLLLLLLLLNNNNNNNNSSSSSSDDDDDDDDLLLLLLLLRRRRRRRRRRRKKKKKKKKKLLLLLLLLAAAAAVVVVVVVNNNNNNNNLLLLLLLLIIIIIIIIPPPPPPPFFFFFFFFFFFPPPPPPPRRRRRRRRRRRLLLLLLLLHHHHHHHHHHFFFFFFFFFFFFFFFFFFFFFFMMMMMMMMVVVVVVVGGGGFFFFFFFFFFFAAAAAPPPPPPPLLLLLLLLTTTTTTTSSSSSSRRRRRRRRRRRGGGGSSSSSSQQQQQQQQQQQQQQQQQQYYYYYYYYYYYYRRRRRRRRRRRSSSSSSLLLLLLLLTTTTTTTVVVVVVVPPPPPPPEEEEEEEEELLLLLLLLTTTTTTTQQQQQQQQQQQQQQQQQQMMMMMMMMWWWWWWWWWWWWWWDDDDDDDDAAAAAKKKKKKKKKNNNNNNNNMMMMMMMMMMMMMMMMCCCCCCAAAAAAAAAADDDDDDDDPPPPPPPRRRRRRRRRRRHHHHHHHHHHGGGGRRRRRRRRRRRYYYYYYYYYYYYLLLLLLLLTTTTTTTAAAAASSSSSSAAAAAMMMMMMMMFFFFFFFFFFFRRRRRRRRRRRGGGGKKKKKKKKKMMMMMMMMSSSSSSTTTTTTTKKKKKKKKKEEEEEEEEEVVVVVVVDDDDDDDDEEEEEEEEEQQQQQQQQQMMMMMMMMLLLLLLLLNNNNNNNNVVVVVVVQQQQQQQQQNNNNNNNNKKKKKKKKKNNNNNNNNSSSSSSSSSSSSYYYYYYYYYYYYFFFFFFFFFFFVVVVVVVEEEEEEEEEWWWWWWWWWWWWWWIIIIIIIIPPPPPPPNNNNNNNNNNNNNNNNVVVVVVVKKKKKKKKKSSSSSSSSSSSSVVVVVVVCCCCCCDDDDDDDDIIIIIIIIPPPPPPPPPPPPPPRRRRRRRRRRRGGGGLLLLLLLLTTTTTTTMMMMMMMMSSSSSSSSSSSSTTTTTTTFFFFFFFFFFFIIIIIIIIGGGGNNNNNNNNSSSSSSTTTTTTTSSSSSSIIIIIIIIQQQQQQQQQEEEEEEEEEMMMMMMMMFFFFFFFFFFFRRRRRRRRRRRRRRRRRRRRRRVVVVVVVSSSSSSEEEEEEEEEQQQQQQQQQFFFFFFFFFFFTTTTTTTAAAAAMMMMMMMMFFFFFFFFFFFRRRRRRRRRRRRRRRRRRRRRRKKKKKKKKKAAAAAFFFFFFFFFFFLLLLLLLLHHHHHHHHHHWWWWWWWWWWWWWWYYYYYYYYYYYYTTTTTTTGGGGEEEEEEEEEGGGGMMMMMMMMDDDDDDDDEEEEEEEEEMMMMMMMMEEEEEEEEEFFFFFFFFFFFTTTTTTTEEEEEEEEEAAAAAEEEEEEEEESSSSSSNNNNNNNNMMMMMMMMNNNNNNNNDDDDDDDDLLLLLLLLVVVVVVVAAAAAEEEEEEEEEYYYYYYYYYYYYQQQQQQQQQQQQQQQQQQYYYYYYYYYYYYQQQQQQQQQDDDDDDDDAAAAATTTTTTTAAAAAEEEEEEEEEEEEEEEEEEEEEEEEEEEEEEEEEEEEEEEEEEEEEYYYYYYYYYYYYDDDDDDDDDDDDDDDDDDDDDDDDEEEEEEEEEEEEEEEEEEEEEEEEEEEEEEEEEEEEVVVVVVVAAAAAAAAAAA

SEQ ID NO: 167 - protein, 3486 aa, Zea mays
MMMMMMMMRRRRRRRRRRREEEEEEEEEIIIIIIIILLLLLLLLHHHHHHHHHHIIIIIIIIQQQQQQQQQGGGGGGGGQQQQQQQQQCCCCCCGGGGNNNNNNNNQQQQQQQQQIIIIIIIIGGGGAAAAAKKKKKKKKKFFFFFFFFFFFWWWWWWWWWWWWWWEEEEEEEEEVVVVVVVIIIIIIIICCCCCCGGGGEEEEEEEEEHHHHHHHHHHGGGGVVVVVVVDDDDDDDDSSSSSSTTTTTTTGGGGCCCCCCYYYYYYYYYYYYSSSSSSGGGGVVVVVVVSSSSSSPPPPPPPQQQQQQQQQQQQQQQQQQLLLLLLLLEEEEEEEEERRRRRRRRRRRIIIIIIIINNNNNNNNVVVVVVVYYYYYYYYYYYYYYYYYYYYYYYYNNNNNNNNEEEEEEEEEAAAAAGGGGGGGGGGGGRRRRRRRRRRRYYYYYYYYYYYYVVVVVVVPPPPPPPRRRRRRRRRRRAAAAAVVVVVVVLLLLLLLLMMMMMMMMDDDDDDDDLLLLLLLLEEEEEEEEEPPPPPPPGGGGTTTTTTTMMMMMMMMEEEEEEEEESSSSSSIIIIIIIIRRRRRRRRRRRAAAAAGGGGPPPPPPPFFFFFFFFFFFGGGGGGGGIIIIIIIIFFFFFFFFFFFRRRRRRRRRRRPPPPPPPDDDDDDDDNNNNNNNNFFFFFFFFFFFVVVVVVVYYYYYYYYYYYYGGGGQQQQQQQQQSSSSSSGGGGAAAAAGGGGNNNNNNNNNNNNNNNNWWWWWWWWWWWWWWAAAAAKKKKKKKKKGGGGHHHHHHHHHHYYYYYYYYYYYYTTTTTTTEEEEEEEEEGGGGAAAAAEEEEEEEEELLLLLLLLIIIIIIIIDDDDDDDDSSSSSSVVVVVVVLLLLLLLLDDDDDDDDVVVVVVVVVVVVVVRRRRRRRRRRRKKKKKKKKKEEEEEEEEEAAAAAEEEEEEEEENNNNNNNNCCCCCCDDDDDDDDCCCCCCLLLLLLLLQQQQQQQQQGGGGFFFFFFFFFFFQQQQQQQQQVVVVVVVCCCCCCHHHHHHHHHHSSSSSSLLLLLLLLGGGGGGGGGGGGTTTTTTTGGGGSSSSSSGGGGMMMMMMMMGGGGTTTTTTTLLLLLLLLLLLLLLLLIIIIIIIISSSSSSKKKKKKKKKIIIIIIIIRRRRRRRRRRREEEEEEEEEEEEEEEEEEYYYYYYYYYYYYPPPPPPPDDDDDDDDRRRRRRRRRRRMMMMMMMMMMMMMMMMLLLLLLLLTTTTTTTFFFFFFFFFFFSSSSSSVVVVVVVFFFFFFFFFFFPPPPPPPSSSSSSPPPPPPPKKKKKKKKKVVVVVVVSSSSSSDDDDDDDDTTTTTTTVVVVVVVVVVVVVVEEEEEEEEEPPPPPPPYYYYYYYYYYYYNNNNNNNNAAAAATTTTTTTLLLLLLLLSSSSSSVVVVVVVHHHHHHHHHHQQQQQQQQQLLLLLLLLVVVVVVVEEEEEEEEENNNNNNNNAAAAADDDDDDDDEEEEEEEEECCCCCCMMMMMMMMVVVVVVVLLLLLLLLDDDDDDDDNNNNNNNNEEEEEEEEEAAAAALLLLLLLLYYYYYYYYYYYYDDDDDDDDIIIIIIIICCCCCCFFFFFFFFFFFRRRRRRRRRRRTTTTTTTLLLLLLLLKKKKKKKKKLLLLLLLLTTTTTTTNNNNNNNNPPPPPPPSSSSSSFFFFFFFFFFFGGGGDDDDDDDDLLLLLLLLNNNNNNNNHHHHHHHHHHLLLLLLLLIIIIIIIISSSSSSAAAAATTTTTTTMMMMMMMMSSSSSSGGGGVVVVVVVTTTTTTTCCCCCCCCCCCCLLLLLLLLRRRRRRRRRRRFFFFFFFFFFFPPPPPPPGGGGQQQQQQQQQLLLLLLLLNNNNNNNNSSSSSSDDDDDDDDLLLLLLLLRRRRRRRRRRRKKKKKKKKKLLLLLLLLAAAAAVVVVVVVNNNNNNNNLLLLLLLLIIIIIIIIPPPPPPPFFFFFFFFFFFPPPPPPPRRRRRRRRRRRLLLLLLLLHHHHHHHHHHFFFFFFFFFFFFFFFFFFFFFFMMMMMMMMVVVVVVVGGGGFFFFFFFFFFFAAAAAPPPPPPPLLLLLLLLTTTTTTTSSSSSSRRRRRRRRRRRGGGGSSSSSSQQQQQQQQQQQQQQQQQQYYYYYYYYYYYYRRRRRRRRRRRAAAAALLLLLLLLTTTTTTTVVVVVVVPPPPPPPEEEEEEEEELLLLLLLLTTTTTTTQQQQQQQQQQQQQQQQQQMMMMMMMMWWWWWWWWWWWWWWDDDDDDDDAAAAAKKKKKKKKKNNNNNNNNMMMMMMMMMMMMMMMMCCCCCCAAAAAAAAAADDDDDDDDPPPPPPPRRRRRRRRRRRHHHHHHHHHHGGGGRRRRRRRRRRRYYYYYYYYYYYYLLLLLLLLTTTTTTTAAAAASSSSSSAAAAAMMMMMMMMFFFFFFFFFFFRRRRRRRRRRRGGGGKKKKKKKKKMMMMMMMMSSSSSSTTTTTTTKKKKKKKKKEEEEEEEEEVVVVVVVDDDDDDDDEEEEEEEEEQQQQQQQQQMMMMMMMMIIIIIIIINNNNNNNNVVVVVVVQQQQQQQQQNNNNNNNNKKKKKKKKKNNNNNNNNSSSSSSSSSSSSYYYYYYYYYYYYFFFFFFFFFFFVVVVVVVEEEEEEEEEWWWWWWWWWWWWWWIIIIIIIIPPPPPPPNNNNNNNNNNNNNNNNVVVVVVVKKKKKKKKKSSSSSSSSSSSSVVVVVVVCCCCCCDDDDDDDDIIIIIIIIPPPPPPPPPPPPPPVVVVVVVGGGGLLLLLLLLSSSSSSMMMMMMMMSSSSSSSSSSSSTTTTTTTFFFFFFFFFFFVVVVVVVGGGGNNNNNNNNSSSSSSTTTTTTTSSSSSSIIIIIIIIQQQQQQQQQEEEEEEEEEMMMMMMMMFFFFFFFFFFFRRRRRRRRRRRRRRRRRRRRRRVVVVVVVSSSSSSEEEEEEEEEQQQQQQQQQFFFFFFFFFFFTTTTTTTAAAAAMMMMMMMMFFFFFFFFFFFRRRRRRRRRRRRRRRRRRRRRRKKKKKKKKKAAAAAFFFFFFFFFFFLLLLLLLLHHHHHHHHHHWWWWWWWWWWWWWWYYYYYYYYYYYYTTTTTTTSSSSSSEEEEEEEEEGGGGMMMMMMMMDDDDDDDDEEEEEEEEEMMMMMMMMEEEEEEEEEFFFFFFFFFFFTTTTTTTEEEEEEEEEAAAAAEEEEEEEEESSSSSSNNNNNNNNMMMMMMMMNNNNNNNNDDDDDDDDLLLLLLLLVVVVVVVAAAAAEEEEEEEEEYYYYYYYYYYYYQQQQQQQQQQQQQQQQQQYYYYYYYYYYYYQQQQQQQQQDDDDDDDDAAAAATTTTTTTAAAAAEEEEEEEEEEEEEEEEEEYYYYYYYYYYYYDDDDDDDDEEEEEEEEEEEEEEEEEEEEEEEEEEEQQQQQQQQQDDDDDDDDGGGGEEEEEEEEEEEEEEEEEEEEEEEEEEEHHHHHHHHHHDDDDDDDDD

SEQ ID NO: 168 - protein, 3508 aa, Oryza sativa
MMMMMMMMRRRRRRRRRRREEEEEEEEEIIIIIIIILLLLLLLLHHHHHHHHHHIIIIIIIIQQQQQQQQQGGGGGGGGQQQQQQQQQCCCCCCGGGGNNNNNNNNQQQQQQQQQIIIIIIIIGGGGAAAAAKKKKKKKKKFFFFFFFFFFFWWWWWWWWWWWWWWEEEEEEEEEVVVVVVVIIIIIIIICCCCCCDDDDDDDDEEEEEEEEEHHHHHHHHHHGGGGIIIIIIIIDDDDDDDDHHHHHHHHHHTTTTTTTGGGGKKKKKKKKKYYYYYYYYYYYYSSSSSSGGGGDDDDDDDDSSSSSSDDDDDDDDLLLLLLLLQQQQQQQQQLLLLLLLLEEEEEEEEERRRRRRRRRRRIIIIIIIINNNNNNNNVVVVVVVYYYYYYYYYYYYYYYYYYYYYYYYNNNNNNNNEEEEEEEEEAAAAASSSSSSGGGGGGGGRRRRRRRRRRRFFFFFFFFFFFVVVVVVVPPPPPPPRRRRRRRRRRRAAAAAVVVVVVVLLLLLLLLMMMMMMMMDDDDDDDDLLLLLLLLEEEEEEEEEPPPPPPPGGGGTTTTTTTMMMMMMMMDDDDDDDDSSSSSSVVVVVVVRRRRRRRRRRRSSSSSSGGGGPPPPPPPFFFFFFFFFFFGGGGQQQQQQQQQIIIIIIIIFFFFFFFFFFFRRRRRRRRRRRPPPPPPPDDDDDDDDNNNNNNNNFFFFFFFFFFFVVVVVVVFFFFFFFFFFFGGGGQQQQQQQQQSSSSSSGGGGAAAAAGGGGNNNNNNNNNNNNNNNNWWWWWWWWWWWWWWAAAAAKKKKKKKKKGGGGHHHHHHHHHHYYYYYYYYYYYYTTTTTTTEEEEEEEEEGGGGAAAAAEEEEEEEEELLLLLLLLIIIIIIIIDDDDDDDDSSSSSSVVVVVVVLLLLLLLLDDDDDDDDVVVVVVVVVVVVVVRRRRRRRRRRRKKKKKKKKKEEEEEEEEEAAAAAEEEEEEEEENNNNNNNNCCCCCCDDDDDDDDCCCCCCLLLLLLLLQQQQQQQQQGGGGFFFFFFFFFFFQQQQQQQQQVVVVVVVCCCCCCHHHHHHHHHHSSSSSSLLLLLLLLGGGGGGGGGGGGTTTTTTTGGGGSSSSSSGGGGMMMMMMMMGGGGTTTTTTTLLLLLLLLLLLLLLLLIIIIIIIISSSSSSKKKKKKKKKIIIIIIIIRRRRRRRRRRREEEEEEEEEEEEEEEEEEYYYYYYYYYYYYPPPPPPPDDDDDDDDRRRRRRRRRRRMMMMMMMMMMMMMMMMLLLLLLLLTTTTTTTFFFFFFFFFFFSSSSSSVVVVVVVFFFFFFFFFFFPPPPPPPSSSSSSPPPPPPPKKKKKKKKKVVVVVVVSSSSSSDDDDDDDDTTTTTTTVVVVVVVVVVVVVVEEEEEEEEEPPPPPPPYYYYYYYYYYYYNNNNNNNNAAAAATTTTTTTLLLLLLLLSSSSSSVVVVVVVHHHHHHHHHHQQQQQQQQQLLLLLLLLVVVVVVVEEEEEEEEENNNNNNNNAAAAADDDDDDDDEEEEEEEEECCCCCCMMMMMMMMVVVVVVVLLLLLLLLDDDDDDDDNNNNNNNNEEEEEEEEEAAAAALLLLLLLLYYYYYYYYYYYYDDDDDDDDIIIIIIIICCCCCCFFFFFFFFFFFRRRRRRRRRRRTTTTTTTLLLLLLLLKKKKKKKKKLLLLLLLLAAAAATTTTTTTPPPPPPPTTTTTTTFFFFFFFFFFFGGGGDDDDDDDDLLLLLLLLNNNNNNNNHHHHHHHHHHLLLLLLLLIIIIIIIISSSSSSAAAAATTTTTTTMMMMMMMMSSSSSSGGGGVVVVVVVTTTTTTTCCCCCCCCCCCCLLLLLLLLRRRRRRRRRRRFFFFFFFFFFFPPPPPPPGGGGQQQQQQQQQLLLLLLLLNNNNNNNNSSSSSSDDDDDDDDLLLLLLLLRRRRRRRRRRRKKKKKKKKKLLLLLLLLAAAAAVVVVVVVNNNNNNNNLLLLLLLLIIIIIIIIPPPPPPPFFFFFFFFFFFPPPPPPPRRRRRRRRRRRLLLLLLLLHHHHHHHHHHFFFFFFFFFFFFFFFFFFFFFFMMMMMMMMVVVVVVVGGGGFFFFFFFFFFFAAAAAPPPPPPPLLLLLLLLTTTTTTTSSSSSSRRRRRRRRRRRGGGGSSSSSSQQQQQQQQQQQQQQQQQQYYYYYYYYYYYYRRRRRRRRRRRAAAAALLLLLLLLTTTTTTTVVVVVVVPPPPPPPEEEEEEEEELLLLLLLLTTTTTTTQQQQQQQQQQQQQQQQQQMMMMMMMMWWWWWWWWWWWWWWDDDDDDDDAAAAAKKKKKKKKKNNNNNNNNMMMMMMMMMMMMMMMMCCCCCCAAAAAAAAAADDDDDDDDPPPPPPPRRRRRRRRRRRHHHHHHHHHHGGGGRRRRRRRRRRRYYYYYYYYYYYYLLLLLLLLTTTTTTTAAAAASSSSSSAAAAAMMMMMMMMFFFFFFFFFFFRRRRRRRRRRRGGGGKKKKKKKKKMMMMMMMMSSSSSSTTTTTTTKKKKKKKKKEEEEEEEEEVVVVVVVDDDDDDDDEEEEEEEEEQQQQQQQQQMMMMMMMMLLLLLLLLNNNNNNNNVVVVVVVQQQQQQQQQNNNNNNNNKKKKKKKKKNNNNNNNNSSSSSSSSSSSSYYYYYYYYYYYYFFFFFFFFFFFVVVVVVVEEEEEEEEEWWWWWWWWWWWWWWIIIIIIIIPPPPPPPNNNNNNNNNNNNNNNNVVVVVVVKKKKKKKKKSSSSSSSSSSSSVVVVVVVCCCCCCDDDDDDDDIIIIIIIIPPPPPPPPPPPPPPNNNNNNNNGGGGLLLLLLLLKKKKKKKKKMMMMMMMMAAAAASSSSSSTTTTTTTFFFFFFFFFFFIIIIIIIIGGGGNNNNNNNNSSSSSSTTTTTTTSSSSSSIIIIIIIIQQQQQQQQQEEEEEEEEEMMMMMMMMFFFFFFFFFFFRRRRRRRRRRRRRRRRRRRRRRVVVVVVVSSSSSSEEEEEEEEEQQQQQQQQQFFFFFFFFFFFTTTTTTTAAAAAMMMMMMMMFFFFFFFFFFFRRRRRRRRRRRRRRRRRRRRRRKKKKKKKKKAAAAAFFFFFFFFFFFLLLLLLLLHHHHHHHHHHWWWWWWWWWWWWWWYYYYYYYYYYYYTTTTTTTGGGGEEEEEEEEEGGGGMMMMMMMMDDDDDDDDEEEEEEEEEMMMMMMMMEEEEEEEEEFFFFFFFFFFFTTTTTTTEEEEEEEEEAAAAAEEEEEEEEESSSSSSNNNNNNNNMMMMMMMMNNNNNNNNDDDDDDDDLLLLLLLLVVVVVVVAAAAAEEEEEEEEEYYYYYYYYYYYYQQQQQQQQQQQQQQQQQQYYYYYYYYYYYYQQQQQQQQQDDDDDDDDAAAAATTTTTTTAAAAADDDDDDDDDDDDDDDDEEEEEEEEEEEEEEEEEEEEEEEEEEEDDDDDDDDYYYYYYYYYYYYGGGGDDDDDDDDEEEEEEEEEEEEEEEEEEEEEEEEEEEDDDDDDDDEEEEEEEEEVVVVVVVAAAAAAAAAAA

SEQ ID NO: 169 - protein, 3466 aa, Pisum sativum
GGGGQQQQQQQQQCCCCCCGGGGNNNNNNNNQQQQQQQQQIIIIIIIIGGGGSSSSSSKKKKKKKKKFFFFFFFFFFFWWWWWWWWWWWWWWEEEEEEEEEVVVVVVVVVVVVVVCCCCCCDDDDDDDDEEEEEEEEEHHHHHHHHHHGGGGIIIIIIIIDDDDDDDDPPPPPPPTTTTTTTGGGGRRRRRRRRRRRYYYYYYYYYYYYVVVVVVVGGGGNNNNNNNNSSSSSSDDDDDDDDLLLLLLLLQQQQQQQQQLLLLLLLLEEEEEEEEERRRRRRRRRRRVVVVVVVNNNNNNNNVVVVVVVYYYYYYYYYYYYYYYYYYYYYYYYNNNNNNNNEEEEEEEEEAAAAASSSSSSCCCCCCGGGGRRRRRRRRRRRFFFFFFFFFFFVVVVVVVPPPPPPPRRRRRRRRRRRAAAAAIIIIIIIILLLLLLLLMMMMMMMMDDDDDDDDLLLLLLLLEEEEEEEEEPPPPPPPGGGGTTTTTTTMMMMMMMMDDDDDDDDSSSSSSVVVVVVVRRRRRRRRRRRTTTTTTTGGGGPPPPPPPYYYYYYYYYYYYGGGGQQQQQQQQQIIIIIIIIFFFFFFFFFFFRRRRRRRRRRRPPPPPPPDDDDDDDDNNNNNNNNFFFFFFFFFFFVVVVVVVFFFFFFFFFFFGGGGQQQQQQQQQSSSSSSGGGGAAAAAGGGGNNNNNNNNNNNNNNNNWWWWWWWWWWWWWWAAAAAKKKKKKKKKGGGGHHHHHHHHHHYYYYYYYYYYYYTTTTTTTEEEEEEEEEGGGGAAAAAEEEEEEEEELLLLLLLLIIIIIIIIDDDDDDDDSSSSSSVVVVVVVLLLLLLLLDDDDDDDDVVVVVVVVVVVVVVRRRRRRRRRRRKKKKKKKKKEEEEEEEEEAAAAAEEEEEEEEENNNNNNNNCCCCCCDDDDDDDDCCCCCCLLLLLLLLQQQQQQQQQGGGGFFFFFFFFFFFQQQQQQQQQVVVVVVVCCCCCCHHHHHHHHHHSSSSSSLLLLLLLLGGGGGGGGGGGGTTTTTTTGGGGSSSSSSGGGGMMMMMMMMGGGGTTTTTTTLLLLLLLLLLLLLLLLIIIIIIIISSSSSSKKKKKKKKKIIIIIIIIRRRRRRRRRRREEEEEEEEEEEEEEEEEEYYYYYYYYYYYYPPPPPPPDDDDDDDDRRRRRRRRRRRMMMMMMMMMMMMMMMMLLLLLLLLTTTTTTTFFFFFFFFFFFSSSSSSVVVVVVVFFFFFFFFFFFPPPPPPPSSSSSSPPPPPPPKKKKKKKKKVVVVVVVSSSSSSDDDDDDDDTTTTTTTVVVVVVVVVVVVVVEEEEEEEEEPPPPPPPYYYYYYYYYYYYNNNNNNNNAAAAATTTTTTTLLLLLLLLSSSSSSVVVVVVVHHHHHHHHHHQQQQQQQQQLLLLLLLLVVVVVVVEEEEEEEEENNNNNNNNAAAAADDDDDDDDEEEEEEEEECCCCCCMMMMMMMMVVVVVVVLLLLLLLLDDDDDDDDNNNNNNNNEEEEEEEEEAAAAALLLLLLLLYYYYYYYYYYYYDDDDDDDDIIIIIIIICCCCCCFFFFFFFFFFFRRRRRRRRRRRTTTTTTTLLLLLLLLKKKKKKKKKLLLLLLLLTTTTTTTTTTTTTTPPPPPPPSSSSSSFFFFFFFFFFFGGGGDDDDDDDDLLLLLLLLNNNNNNNNHHHHHHHHHHLLLLLLLLIIIIIIIISSSSSSAAAAATTTTTTTMMMMMMMMSSSSSSGGGGVVVVVVVTTTTTTTCCCCCCCCCCCCLLLLLLLLRRRRRRRRRRRFFFFFFFFFFFPPPPPPPGGGGQQQQQQQQQLLLLLLLLNNNNNNNNSSSSSSDDDDDDDDLLLLLLLLRRRRRRRRRRRKKKKKKKKKLLLLLLLLAAAAAVVVVVVVNNNNNNNNLLLLLLLLIIIIIIIIPPPPPPPFFFFFFFFFFFPPPPPPPRRRRRRRRRRRLLLLLLLLHHHHHHHHHHFFFFFFFFFFFFFFFFFFFFFFMMMMMMMMVVVVVVVGGGGFFFFFFFFFFFAAAAAPPPPPPPLLLLLLLLTTTTTTTSSSSSSRRRRRRRRRRRGGGGSSSSSSQQQQQQQQQQQQQQQQQQYYYYYYYYYYYYRRRRRRRRRRRAAAAALLLLLLLLTTTTTTTVVVVVVVPPPPPPPEEEEEEEEELLLLLLLLTTTTTTTQQQQQQQQQQQQQQQQQQMMMMMMMMWWWWWWWWWWWWWWDDDDDDDDSSSSSSKKKKKKKKKNNNNNNNNMMMMMMMMMMMMMMMMCCCCCCAAAAAAAAAADDDDDDDDPPPPPPPRRRRRRRRRRRHHHHHHHHHHGGGGRRRRRRRRRRRYYYYYYYYYYYYLLLLLLLLTTTTTTTAAAAASSSSSSAAAAAMMMMMMMMFFFFFFFFFFFRRRRRRRRRRRGGGGKKKKKKKKKMMMMMMMMSSSSSSTTTTTTTKKKKKKKKKEEEEEEEEEVVVVVVVDDDDDDDDEEEEEEEEEQQQQQQQQQMMMMMMMMIIIIIIIINNNNNNNNVVVVVVVQQQQQQQQQNNNNNNNNKKKKKKKKKNNNNNNNNSSSSSSSSSSSSYYYYYYYYYYYYFFFFFFFFFFFVVVVVVVEEEEEEEEEWWWWWWWWWWWWWWIIIIIIIIPPPPPPPNNNNNNNNNNNNNNNNVVVVVVVKKKKKKKKKSSSSSSSSSSSSVVVVVVVCCCCCCDDDDDDDDIIIIIIIIAAAAAPPPPPPPRRRRRRRRRRRGGGGLLLLLLLLSSSSSSMMMMMMMMAAAAASSSSSSTTTTTTTFFFFFFFFFFFIIIIIIIIGGGGNNNNNNNNSSSSSSTTTTTTTSSSSSSIIIIIIIIQQQQQQQQQEEEEEEEEEMMMMMMMMFFFFFFFFFFFRRRRRRRRRRRRRRRRRRRRRRVVVVVVVSSSSSSEEEEEEEEEQQQQQQQQQFFFFFFFFFFFTTTTTTTAAAAAMMMMMMMMFFFFFFFFFFFRRRRRRRRRRRRRRRRRRRRRRKKKKKKKKKAAAAAFFFFFFFFFFFLLLLLLLLHHHHHHHHHHWWWWWWWWWWWWWWYYYYYYYYYYYYTTTTTTTGGGGEEEEEEEEEGGGGMMMMMMMMDDDDDDDDEEEEEEEEEMMMMMMMMEEEEEEEEEFFFFFFFFFFFTTTTTTTEEEEEEEEEAAAAAEEEEEEEEESSSSSSNNNNNNNNMMMMMMMMNNNNNNNNDDDDDDDDLLLLLLLLVVVVVVVSSSSSSEEEEEEEEEYYYYYYYYYYYYQQQQQQQQQQQQQQQQQQYYYYYYYYYYYYQQQQQQQQQDDDDDDDDAAAAATTTTTTTAAAAADDDDDDDDEEEEEEEEEEEEEEEEEEGGGGEEEEEEEEEYYYYYYYYYYYYEEEEEEEEEDDDDDDDDEEEEEEEEEEEEEEEEEEEEEEEEEEEEEEEEEEEEEEEEEEEEEPPPPPPPEEEEEEEEEHHHHHHHHHHGGGGYYYYYYYYYYYYEEEEEEEEEE

SEQ ID NO: 170 - protein, 3483 aa, Porphyra purpurea
MMMMMMMMRRRRRRRRRRREEEEEEEEEIIIIIIIIVVVVVVVHHHHHHHHHHIIIIIIIIQQQQQQQQQAAAAAGGGGQQQQQQQQQCCCCCCGGGGNNNNNNNNQQQQQQQQQIIIIIIIIGGGGAAAAAKKKKKKKKKFFFFFFFFFFFWWWWWWWWWWWWWWQQQQQQQQQVVVVVVVIIIIIIIISSSSSSDDDDDDDDEEEEEEEEEHHHHHHHHHHGGGGVVVVVVVDDDDDDDDPPPPPPPTTTTTTTGGGGTTTTTTTYYYYYYYYYYYYKKKKKKKKKGGGGDDDDDDDDSSSSSSDDDDDDDDLLLLLLLLQQQQQQQQQLLLLLLLLEEEEEEEEERRRRRRRRRRRIIIIIIIINNNNNNNNVVVVVVVYYYYYYYYYYYYYYYYYYYYYYYYNNNNNNNNEEEEEEEEEAAAAATTTTTTTGGGGGGGGRRRRRRRRRRRYYYYYYYYYYYYVVVVVVVPPPPPPPRRRRRRRRRRRAAAAAVVVVVVVLLLLLLLLIIIIIIIIDDDDDDDDLLLLLLLLEEEEEEEEEPPPPPPPGGGGTTTTTTTMMMMMMMMDDDDDDDDAAAAAVVVVVVVRRRRRRRRRRRAAAAAGGGGPPPPPPPFFFFFFFFFFFGGGGQQQQQQQQQLLLLLLLLFFFFFFFFFFFRRRRRRRRRRRPPPPPPPDDDDDDDDNNNNNNNNFFFFFFFFFFFVVVVVVVFFFFFFFFFFFGGGGQQQQQQQQQTTTTTTTGGGGAAAAAGGGGNNNNNNNNNNNNNNNNWWWWWWWWWWWWWWAAAAAKKKKKKKKKGGGGHHHHHHHHHHYYYYYYYYYYYYTTTTTTTEEEEEEEEEGGGGAAAAAEEEEEEEEELLLLLLLLIIIIIIIIDDDDDDDDSSSSSSVVVVVVVLLLLLLLLDDDDDDDDVVVVVVVVVVVVVVRRRRRRRRRRRNNNNNNNNEEEEEEEEEAAAAAEEEEEEEEESSSSSSCCCCCCDDDDDDDDCCCCCCLLLLLLLLQQQQQQQQQGGGGFFFFFFFFFFFQQQQQQQQQMMMMMMMMTTTTTTTHHHHHHHHHHSSSSSSLLLLLLLLGGGGGGGGGGGGTTTTTTTGGGGSSSSSSGGGGMMMMMMMMGGGGTTTTTTTLLLLLLLLLLLLLLLLIIIIIIIIAAAAAKKKKKKKKKLLLLLLLLRRRRRRRRRRREEEEEEEEEEEEEEEEEEYYYYYYYYYYYYPPPPPPPDDDDDDDDRRRRRRRRRRRVVVVVVVMMMMMMMMMMMMMMMMTTTTTTTFFFFFFFFFFFSSSSSSVVVVVVVCCCCCCPPPPPPPSSSSSSPPPPPPPKKKKKKKKKVVVVVVVSSSSSSDDDDDDDDTTTTTTTVVVVVVVVVVVVVVEEEEEEEEEPPPPPPPYYYYYYYYYYYYNNNNNNNNAAAAATTTTTTTLLLLLLLLSSSSSSVVVVVVVHHHHHHHHHHQQQQQQQQQIIIIIIIIVVVVVVVEEEEEEEEENNNNNNNNTTTTTTTDDDDDDDDEEEEEEEEESSSSSSFFFFFFFFFFFVVVVVVVLLLLLLLLDDDDDDDDNNNNNNNNEEEEEEEEEAAAAALLLLLLLLYYYYYYYYYYYYDDDDDDDDIIIIIIIICCCCCCFFFFFFFFFFFRRRRRRRRRRRTTTTTTTLLLLLLLLKKKKKKKKKLLLLLLLLTTTTTTTTTTTTTTPPPPPPPTTTTTTTYYYYYYYYYYYYGGGGDDDDDDDDLLLLLLLLNNNNNNNNHHHHHHHHHHLLLLLLLLVVVVVVVCCCCCCVVVVVVVCCCCCCMMMMMMMMSSSSSSGGGGVVVVVVVTTTTTTTSSSSSSSSSSSSLLLLLLLLRRRRRRRRRRRFFFFFFFFFFFPPPPPPPGGGGQQQQQQQQQLLLLLLLLNNNNNNNNCCCCCCDDDDDDDDLLLLLLLLRRRRRRRRRRRKKKKKKKKKVVVVVVVAAAAAVVVVVVVNNNNNNNNLLLLLLLLIIIIIIIIPPPPPPPFFFFFFFFFFFPPPPPPPRRRRRRRRRRRLLLLLLLLHHHHHHHHHHFFFFFFFFFFFFFFFFFFFFFFMMMMMMMMVVVVVVVGGGGFFFFFFFFFFFAAAAAPPPPPPPLLLLLLLLTTTTTTTSSSSSSRRRRRRRRRRRGGGGSSSSSSQQQQQQQQQQQQQQQQQQYYYYYYYYYYYYRRRRRRRRRRRAAAAALLLLLLLLTTTTTTTVVVVVVVPPPPPPPEEEEEEEEELLLLLLLLTTTTTTTQQQQQQQQQQQQQQQQQQCCCCCCFFFFFFFFFFFDDDDDDDDAAAAAKKKKKKKKKNNNNNNNNMMMMMMMMMMMMMMMMCCCCCCAAAAAAAAAADDDDDDDDPPPPPPPRRRRRRRRRRRHHHHHHHHHHGGGGRRRRRRRRRRRFFFFFFFFFFFLLLLLLLLTTTTTTTAAAAASSSSSSCCCCCCMMMMMMMMFFFFFFFFFFFRRRRRRRRRRRGGGGRRRRRRRRRRRMMMMMMMMSSSSSSTTTTTTTKKKKKKKKKEEEEEEEEEVVVVVVVDDDDDDDDEEEEEEEEEQQQQQQQQQMMMMMMMMLLLLLLLLNNNNNNNNVVVVVVVQQQQQQQQQTTTTTTTKKKKKKKKKNNNNNNNNSSSSSSSSSSSSYYYYYYYYYYYYFFFFFFFFFFFVVVVVVVEEEEEEEEEWWWWWWWWWWWWWWIIIIIIIIPPPPPPPNNNNNNNNNNNNNNNNIIIIIIIIKKKKKKKKKAAAAASSSSSSVVVVVVVCCCCCCDDDDDDDDIIIIIIIIPPPPPPPPPPPPPPKKKKKKKKKGGGGLLLLLLLLKKKKKKKKKMMMMMMMMSSSSSSSSSSSSTTTTTTTFFFFFFFFFFFVVVVVVVGGGGNNNNNNNNSSSSSSTTTTTTTAAAAAIIIIIIIIQQQQQQQQQEEEEEEEEEMMMMMMMMFFFFFFFFFFFKKKKKKKKKRRRRRRRRRRRVVVVVVVGGGGEEEEEEEEEQQQQQQQQQFFFFFFFFFFFTTTTTTTAAAAAMMMMMMMMYYYYYYYYYYYYKKKKKKKKKRRRRRRRRRRRKKKKKKKKKAAAAAFFFFFFFFFFFLLLLLLLLHHHHHHHHHHWWWWWWWWWWWWWWYYYYYYYYYYYYTTTTTTTGGGGEEEEEEEEEGGGGMMMMMMMMDDDDDDDDDDDDDDDDMMMMMMMMEEEEEEEEEFFFFFFFFFFFTTTTTTTEEEEEEEEEAAAAAEEEEEEEEESSSSSSNNNNNNNNMMMMMMMMNNNNNNNNDDDDDDDDLLLLLLLLVVVVVVVSSSSSSEEEEEEEEEYYYYYYYYYYYYQQQQQQQQQQQQQQQQQQYYYYYYYYYYYYQQQQQQQQQEEEEEEEEEAAAAASSSSSSAAAAADDDDDDDDDDDDDDDDEEEEEEEEEAAAAADDDDDDDDEEEEEEEEEFFFFFFFFFFFDDDDDDDDEEEEEEEEEEEEEEEEEEEEEEEEEEEGGGGDDDDDDDDEEEEEEEEEEEEEEEEEEE

SEQ ID NO: 171 - protein, 3203 aa, Glycine max
MMMMMMMMRRRRRRRRRRREEEEEEEEEIIIIIIIILLLLLLLLHHHHHHHHHHIIIIIIIIQQQQQQQQQGGGGGGGGQQQQQQQQQCCCCCCGGGGNNNNNNNNQQQQQQQQQIIIIIIIIGGGGAAAAAKKKKKKKKKFFFFFFFFFFFWWWWWWWWWWWWWWEEEEEEEEEVVVVVVVIIIIIIIICCCCCCDDDDDDDDEEEEEEEEEHHHHHHHHHHGGGGIIIIIIIIDDDDDDDDHHHHHHHHHHTTTTTTTGGGGKKKKKKKKKYYYYYYYYYYYYSSSSSSGGGGDDDDDDDDSSSSSSEEEEEEEEELLLLLLLLQQQQQQQQQLLLLLLLLEEEEEEEEERRRRRRRRRRRIIIIIIIINNNNNNNNVVVVVVVYYYYYYYYYYYYYYYYYYYYYYYYNNNNNNNNEEEEEEEEEAAAAASSSSSSGGGGGGGGRRRRRRRRRRRYYYYYYYYYYYYVVVVVVVPPPPPPPRRRRRRRRRRRAAAAAVVVVVVVLLLLLLLLMMMMMMMMDDDDDDDDLLLLLLLLEEEEEEEEEPPPPPPPGGGGTTTTTTTMMMMMMMMDDDDDDDDSSSSSSVVVVVVVRRRRRRRRRRRSSSSSSGGGGPPPPPPPYYYYYYYYYYYYGGGGQQQQQQQQQIIIIIIIIFFFFFFFFFFFRRRRRRRRRRRPPPPPPPDDDDDDDDNNNNNNNNFFFFFFFFFFFVVVVVVVFFFFFFFFFFFGGGGQQQQQQQQQSSSSSSGGGGAAAAAGGGGNNNNNNNNNNNNNNNNWWWWWWWWWWWWWWAAAAAKKKKKKKKKGGGGHHHHHHHHHHYYYYYYYYYYYYTTTTTTTEEEEEEEEEGGGGAAAAAEEEEEEEEELLLLLLLLIIIIIIIIDDDDDDDDSSSSSSVVVVVVVLLLLLLLLDDDDDDDDVVVVVVVVVVVVVVRRRRRRRRRRRKKKKKKKKKEEEEEEEEEAAAAAEEEEEEEEENNNNNNNNCCCCCCDDDDDDDDCCCCCCLLLLLLLLQQQQQQQQQGGGGFFFFFFFFFFFQQQQQQQQQVVVVVVVCCCCCCHHHHHHHHHHSSSSSSLLLLLLLLGGGGGGGGGGGGTTTTTTTGGGGSSSSSSGGGGMMMMMMMMGGGGTTTTTTTLLLLLLLLLLLLLLLLIIIIIIIISSSSSSKKKKKKKKKIIIIIIIIRRRRRRRRRRREEEEEEEEEEEEEEEEEEYYYYYYYYYYYYPPPPPPPDDDDDDDDRRRRRRRRRRRMMMMMMMMMMMMMMMMLLLLLLLLTTTTTTTFFFFFFFFFFFSSSSSSVVVVVVVFFFFFFFFFFFPPPPPPPSSSSSSPPPPPPPKKKKKKKKKVVVVVVVSSSSSSDDDDDDDDTTTTTTTVVVVVVVVVVVVVVEEEEEEEEEPPPPPPPYYYYYYYYYYYYNNNNNNNNAAAAATTTTTTTLLLLLLLLSSSSSSVVVVVVVHHHHHHHHHHQQQQQQQQQLLLLLLLLVVVVVVVEEEEEEEEENNNNNNNNAAAAADDDDDDDDEEEEEEEEECCCCCCMMMMMMMMVVVVVVVLLLLLLLLDDDDDDDDNNNNNNNNEEEEEEEEEAAAAALLLLLLLLYYYYYYYYYYYYDDDDDDDDIIIIIIIICCCCCCFFFFFFFFFFFRRRRRRRRRRRTTTTTTTLLLLLLLLKKKKKKKKKLLLLLLLLAAAAATTTTTTTPPPPPPPTTTTTTTFFFFFFFFFFFGGGGDDDDDDDDLLLLLLLLNNNNNNNNHHHHHHHHHHLLLLLLLLIIIIIIIISSSSSSAAAAATTTTTTTMMMMMMMMSSSSSSGGGGVVVVVVVTTTTTTTCCCCCCCCCCCCLLLLLLLLRRRRRRRRRRRFFFFFFFFFFFPPPPPPPGGGGQQQQQQQQQLLLLLLLLNNNNNNNNSSSSSSDDDDDDDDLLLLLLLLRRRRRRRRRRRKKKKKKKKKLLLLLLLLAAAAAVVVVVVVNNNNNNNNLLLLLLLLIIIIIIIIPPPPPPPFFFFFFFFFFFPPPPPPPRRRRRRRRRRRLLLLLLLLHHHHHHHHHHFFFFFFFFFFFFFFFFFFFFFFMMMMMMMMVVVVVVVGGGGFFFFFFFFFFFAAAAAPPPPPPPLLLLLLLLTTTTTTTSSSSSSRRRRRRRRRRRGGGGSSSSSSQQQQQQQQQQQQQQQQQQYYYYYYYYYYYYRRRRRRRRRRRAAAAALLLLLLLLTTTTTTTVVVVVVVPPPPPPPEEEEEEEEELLLLLLLLTTTTTTTQQQQQQQQQQQQQQQQQQMMMMMMMMWWWWWWWWWWWWWWDDDDDDDDAAAAAKKKKKKKKKNNNNNNNNMMMMMMMMMMMMMMMMCCCCCCAAAAAAAAAADDDDDDDDPPPPPPPRRRRRRRRRRRHHHHHHHHHHGGGGRRRRRRRRRRRYYYYYYYYYYYYLLLLLLLLTTTTTTTAAAAASSSSSSAAAAAMMMMMMMMFFFFFFFFFFFRRRRRRRRRRRGGGGKKKKKKKKKMMMMMMMMSSSSSSTTTTTTTKKKKKKKKKEEEEEEEEEVVVVVVVDDDDDDDDEEEEEEEEEQQQQQQQQQMMMMMMMMIIIIIIIINNNNNNNNVVVVVVVQQQQQQQQQNNNNNNNNKKKKKKKKKNNNNNNNNSSSSSSSSSSSSYYYYYYYYYYYYFFFFFFFFFFFVVVVVVVEEEEEEEEEWWWWWWWWWWWWWWIIIIIIIIPPPPPPPNNNNNNNNNNNNNNNNVVVVVVVKKKKKKKKKSSSSSSSSSSSSVVVVVVVCCCCCCDDDDDDDDIIIIIIIIPPPPPPPPPPPPPPKKKKKKKKKGGGGLLLLLLLLKKKKKKKKKMMMMMMMMAAAAASSSSSSTTTTTTTFFFFFFFFFFFIIIIIIIIGGGGNNNNNNNNSSSSSSTTTTTTTSSSSSSIIIIIIIIQQQQQQQQQEEEEEEEEEMMMMMMMMFFFFFFFFFFFRRRRRRRRRRRRRRRRRRRRRRVVVVVVVSSSSSSEEEEEEEEEQQQQQQQQQFFFFFFFFFFFTTTTTTTAAAAAMMMMMMMMFFFFFFFFFFFRRRRRRRRRRRRRRRRRRRRRRKKKKKKKKKAAAAAFFFFFFFFFFFLLLLLLLLHHHHHHHHHHWWWWWWWWWWWWWWYYYYYYYYYYYYTTTTTTTGGGGEEEEEEEEEGGGGMMMMMMMMDDDDDDDDEEEEEEEEEMMMMMMMMEEEEEEEEEFFFFFFFFFFFF

SEQ ID NO: 172 - protein, 3497 aa, Triticum aestivum
MMMMMMMMRRRRRRRRRRREEEEEEEEEIIIIIIIILLLLLLLLHHHHHHHHHHIIIIIIIIQQQQQQQQQGGGGGGGGQQQQQQQQQCCCCCCGGGGNNNNNNNNQQQQQQQQQIIIIIIIIGGGGAAAAAKKKKKKKKKFFFFFFFFFFFWWWWWWWWWWWWWWEEEEEEEEEVVVVVVVIIIIIIIICCCCCCDDDDDDDDEEEEEEEEEHHHHHHHHHHGGGGIIIIIIIIDDDDDDDDQQQQQQQQQTTTTTTTGGGGKKKKKKKKKYYYYYYYYYYYYAAAAAGGGGDDDDDDDDSSSSSSDDDDDDDDLLLLLLLLQQQQQQQQQLLLLLLLLEEEEEEEEERRRRRRRRRRRIIIIIIIINNNNNNNNVVVVVVVYYYYYYYYYYYYYYYYYYYYYYYYNNNNNNNNEEEEEEEEEAAAAASSSSSSGGGGGGGGRRRRRRRRRRRFFFFFFFFFFFVVVVVVVPPPPPPPRRRRRRRRRRRAAAAAVVVVVVVLLLLLLLLMMMMMMMMDDDDDDDDLLLLLLLLEEEEEEEEEPPPPPPPGGGGTTTTTTTMMMMMMMMDDDDDDDDSSSSSSLLLLLLLLRRRRRRRRRRRSSSSSSGGGGPPPPPPPYYYYYYYYYYYYGGGGQQQQQQQQQIIIIIIIIFFFFFFFFFFFRRRRRRRRRRRPPPPPPPDDDDDDDDNNNNNNNNFFFFFFFFFFFVVVVVVVFFFFFFFFFFFGGGGQQQQQQQQQSSSSSSGGGGAAAAAGGGGNNNNNNNNNNNNNNNNWWWWWWWWWWWWWWAAAAAKKKKKKKKKGGGGHHHHHHHHHHYYYYYYYYYYYYTTTTTTTEEEEEEEEEGGGGAAAAAEEEEEEEEELLLLLLLLIIIIIIIIDDDDDDDDSSSSSSVVVVVVVLLLLLLLLDDDDDDDDVVVVVVVVVVVVVVRRRRRRRRRRRKKKKKKKKKEEEEEEEEEAAAAAEEEEEEEEENNNNNNNNCCCCCCDDDDDDDDCCCCCCLLLLLLLLQQQQQQQQQGGGGFFFFFFFFFFFQQQQQQQQQVVVVVVVCCCCCCHHHHHHHHHHSSSSSSLLLLLLLLGGGGGGGGGGGGTTTTTTTGGGGSSSSSSGGGGMMMMMMMMGGGGTTTTTTTLLLLLLLLLLLLLLLLIIIIIIIISSSSSSKKKKKKKKKIIIIIIIIRRRRRRRRRRREEEEEEEEEEEEEEEEEEYYYYYYYYYYYYPPPPPPPDDDDDDDDRRRRRRRRRRRMMMMMMMMMMMMMMMMLLLLLLLLTTTTTTTFFFFFFFFFFFSSSSSSVVVVVVVFFFFFFFFFFFPPPPPPPSSSSSSPPPPPPPKKKKKKKKKVVVVVVVSSSSSSDDDDDDDDTTTTTTTVVVVVVVVVVVVVVEEEEEEEEEPPPPPPPYYYYYYYYYYYYNNNNNNNNAAAAATTTTTTTLLLLLLLLSSSSSSVVVVVVVHHHHHHHHHHQQQQQQQQQLLLLLLLLVVVVVVVEEEEEEEEENNNNNNNNAAAAADDDDDDDDEEEEEEEEECCCCCCMMMMMMMMVVVVVVVLLLLLLLLDDDDDDDDNNNNNNNNEEEEEEEEEAAAAALLLLLLLLYYYYYYYYYYYYDDDDDDDDIIIIIIIICCCCCCFFFFFFFFFFFRRRRRRRRRRRTTTTTTTLLLLLLLLKKKKKKKKKLLLLLLLLAAAAATTTTTTTPPPPPPPTTTTTTTFFFFFFFFFFFGGGGDDDDDDDDLLLLLLLLNNNNNNNNHHHHHHHHHHLLLLLLLLIIIIIIIISSSSSSAAAAATTTTTTTMMMMMMMMSSSSSSGGGGVVVVVVVTTTTTTTCCCCCCCCCCCCLLLLLLLLRRRRRRRRRRRFFFFFFFFFFFPPPPPPPGGGGQQQQQQQQQLLLLLLLLNNNNNNNNSSSSSSDDDDDDDDLLLLLLLLRRRRRRRRRRRKKKKKKKKKLLLLLLLLAAAAAVVVVVVVNNNNNNNNLLLLLLLLIIIIIIIIPPPPPPPFFFFFFFFFFFPPPPPPPRRRRRRRRRRRLLLLLLLLHHHHHHHHHHFFFFFFFFFFFFFFFFFFFFFFMMMMMMMMVVVVVVVGGGGFFFFFFFFFFFAAAAAPPPPPPPLLLLLLLLTTTTTTTSSSSSSRRRRRRRRRRRGGGGSSSSSSQQQQQQQQQQQQQQQQQQYYYYYYYYYYYYRRRRRRRRRRRAAAAALLLLLLLLTTTTTTTVVVVVVVPPPPPPPEEEEEEEEELLLLLLLLTTTTTTTQQQQQQQQQQQQQQQQQQMMMMMMMMWWWWWWWWWWWWWWDDDDDDDDSSSSSSKKKKKKKKKNNNNNNNNMMMMMMMMMMMMMMMMCCCCCCAAAAAAAAAADDDDDDDDPPPPPPPRRRRRRRRRRRHHHHHHHHHHGGGGRRRRRRRRRRRYYYYYYYYYYYYLLLLLLLLTTTTTTTAAAAASSSSSSAAAAAMMMMMMMMFFFFFFFFFFFRRRRRRRRRRRGGGGKKKKKKKKKMMMMMMMMSSSSSSTTTTTTTKKKKKKKKKEEEEEEEEEVVVVVVVDDDDDDDDEEEEEEEEEQQQQQQQQQMMMMMMMMLLLLLLLLNNNNNNNNVVVVVVVQQQQQQQQQNNNNNNNNKKKKKKKKKNNNNNNNNSSSSSSSSSSSSYYYYYYYYYYYYFFFFFFFFFFFVVVVVVVEEEEEEEEEWWWWWWWWWWWWWWIIIIIIIIPPPPPPPNNNNNNNNNNNNNNNNVVVVVVVKKKKKKKKKSSSSSSSSSSSSVVVVVVVCCCCCCDDDDDDDDIIIIIIIIPPPPPPPPPPPPPPTTTTTTTGGGGLLLLLLLLSSSSSSMMMMMMMMSSSSSSSSSSSSTTTTTTTFFFFFFFFFFFVVVVVVVGGGGNNNNNNNNSSSSSSTTTTTTTSSSSSSIIIIIIIIQQQQQQQQQEEEEEEEEEMMMMMMMMFFFFFFFFFFFRRRRRRRRRRRRRRRRRRRRRRVVVVVVVSSSSSSEEEEEEEEEQQQQQQQQQFFFFFFFFFFFTTTTTTTAAAAAMMMMMMMMFFFFFFFFFFFRRRRRRRRRRRRRRRRRRRRRRKKKKKKKKKAAAAAFFFFFFFFFFFLLLLLLLLHHHHHHHHHHWWWWWWWWWWWWWWYYYYYYYYYYYYTTTTTTTGGGGEEEEEEEEEGGGGMMMMMMMMDDDDDDDDEEEEEEEEEMMMMMMMMEEEEEEEEEFFFFFFFFFFFTTTTTTTEEEEEEEEEAAAAAEEEEEEEEESSSSSSNNNNNNNNMMMMMMMMNNNNNNNNDDDDDDDDLLLLLLLLVVVVVVVAAAAAEEEEEEEEEYYYYYYYYYYYYQQQQQQQQQQQQQQQQQQYYYYYYYYYYYYQQQQQQQQQDDDDDDDDAAAAATTTTTTTAAAAADDDDDDDDEEEEEEEEEEEEEEEEEEEEEEEEEEEEEEEEEEEEYYYYYYYYYYYYDDDDDDDDEEEEEEEEEEEEEEEEEEEEEEEEEEEEEEEEEEEEEEEEEEEEEEEEEEEEEEAAAAAAAAAAA

SEQ ID NO: 173 - protein, 3496 aa, Arabidopsis thaliana
MMMMMMMMRRRRRRRRRRREEEEEEEEEIIIIIIIILLLLLLLLHHHHHHHHHHIIIIIIIIQQQQQQQQQGGGGGGGGQQQQQQQQQCCCCCCGGGGNNNNNNNNQQQQQQQQQIIIIIIIIGGGGAAAAAKKKKKKKKKFFFFFFFFFFFWWWWWWWWWWWWWWEEEEEEEEEVVVVVVVIIIIIIIICCCCCCDDDDDDDDEEEEEEEEEHHHHHHHHHHGGGGIIIIIIIIDDDDDDDDHHHHHHHHHHTTTTTTTGGGGQQQQQQQQQYYYYYYYYYYYYVVVVVVVGGGGDDDDDDDDSSSSSSPPPPPPPLLLLLLLLQQQQQQQQQLLLLLLLLEEEEEEEEERRRRRRRRRRRIIIIIIIIDDDDDDDDVVVVVVVYYYYYYYYYYYYFFFFFFFFFFFNNNNNNNNEEEEEEEEEAAAAASSSSSSGGGGGGGGKKKKKKKKKYYYYYYYYYYYYVVVVVVVPPPPPPPRRRRRRRRRRRAAAAAVVVVVVVLLLLLLLLMMMMMMMMDDDDDDDDLLLLLLLLEEEEEEEEEPPPPPPPGGGGTTTTTTTMMMMMMMMDDDDDDDDSSSSSSLLLLLLLLRRRRRRRRRRRSSSSSSGGGGPPPPPPPFFFFFFFFFFFGGGGQQQQQQQQQIIIIIIIIFFFFFFFFFFFRRRRRRRRRRRPPPPPPPDDDDDDDDNNNNNNNNFFFFFFFFFFFVVVVVVVFFFFFFFFFFFGGGGQQQQQQQQQSSSSSSGGGGAAAAAGGGGNNNNNNNNNNNNNNNNWWWWWWWWWWWWWWAAAAAKKKKKKKKKGGGGHHHHHHHHHHYYYYYYYYYYYYTTTTTTTEEEEEEEEEGGGGAAAAAEEEEEEEEELLLLLLLLIIIIIIIIDDDDDDDDSSSSSSVVVVVVVLLLLLLLLDDDDDDDDVVVVVVVVVVVVVVRRRRRRRRRRRKKKKKKKKKEEEEEEEEEAAAAAEEEEEEEEENNNNNNNNSSSSSSDDDDDDDDCCCCCCLLLLLLLLQQQQQQQQQGGGGFFFFFFFFFFFQQQQQQQQQVVVVVVVCCCCCCHHHHHHHHHHSSSSSSLLLLLLLLGGGGGGGGGGGGTTTTTTTGGGGSSSSSSGGGGMMMMMMMMGGGGTTTTTTTLLLLLLLLLLLLLLLLIIIIIIIISSSSSSKKKKKKKKKIIIIIIIIRRRRRRRRRRREEEEEEEEEEEEEEEEEEYYYYYYYYYYYYPPPPPPPDDDDDDDDRRRRRRRRRRRMMMMMMMMMMMMMMMMMMMMMMMMTTTTTTTFFFFFFFFFFFSSSSSSVVVVVVVFFFFFFFFFFFPPPPPPPSSSSSSPPPPPPPKKKKKKKKKVVVVVVVSSSSSSDDDDDDDDTTTTTTTVVVVVVVVVVVVVVEEEEEEEEEPPPPPPPYYYYYYYYYYYYNNNNNNNNAAAAATTTTTTTLLLLLLLLSSSSSSVVVVVVVHHHHHHHHHHQQQQQQQQQLLLLLLLLVVVVVVVEEEEEEEEENNNNNNNNAAAAADDDDDDDDEEEEEEEEECCCCCCMMMMMMMMVVVVVVVLLLLLLLLDDDDDDDDNNNNNNNNEEEEEEEEEAAAAALLLLLLLLYYYYYYYYYYYYDDDDDDDDIIIIIIIICCCCCCFFFFFFFFFFFRRRRRRRRRRRTTTTTTTLLLLLLLLKKKKKKKKKLLLLLLLLAAAAANNNNNNNNPPPPPPPTTTTTTTFFFFFFFFFFFGGGGDDDDDDDDLLLLLLLLNNNNNNNNHHHHHHHHHHLLLLLLLLIIIIIIIISSSSSSAAAAATTTTTTTMMMMMMMMSSSSSSGGGGVVVVVVVTTTTTTTCCCCCCCCCCCCLLLLLLLLRRRRRRRRRRRFFFFFFFFFFFPPPPPPPGGGGQQQQQQQQQLLLLLLLLNNNNNNNNSSSSSSDDDDDDDDLLLLLLLLRRRRRRRRRRRKKKKKKKKKLLLLLLLLAAAAAVVVVVVVNNNNNNNNLLLLLLLLIIIIIIIIPPPPPPPFFFFFFFFFFFPPPPPPPRRRRRRRRRRRLLLLLLLLHHHHHHHHHHFFFFFFFFFFFFFFFFFFFFFFMMMMMMMMVVVVVVVGGGGFFFFFFFFFFFAAAAAPPPPPPPLLLLLLLLTTTTTTTSSSSSSRRRRRRRRRRRGGGGSSSSSSQQQQQQQQQQQQQQQQQQYYYYYYYYYYYYSSSSSSAAAAALLLLLLLLSSSSSSVVVVVVVPPPPPPPEEEEEEEEELLLLLLLLTTTTTTTQQQQQQQQQQQQQQQQQQMMMMMMMMWWWWWWWWWWWWWWDDDDDDDDAAAAAKKKKKKKKKNNNNNNNNMMMMMMMMMMMMMMMMCCCCCCAAAAAAAAAADDDDDDDDPPPPPPPRRRRRRRRRRRHHHHHHHHHHGGGGRRRRRRRRRRRYYYYYYYYYYYYLLLLLLLLTTTTTTTRRRRRRRRRRRSSSSSSAAAAAVVVVVVVFFFFFFFFFFFRRRRRRRRRRRGGGGKKKKKKKKKLLLLLLLLSSSSSSTTTTTTTKKKKKKKKKEEEEEEEEEVVVVVVVDDDDDDDDEEEEEEEEEQQQQQQQQQMMMMMMMMMMMMMMMMNNNNNNNNIIIIIIIIQQQQQQQQQNNNNNNNNKKKKKKKKKNNNNNNNNSSSSSSSSSSSSYYYYYYYYYYYYFFFFFFFFFFFVVVVVVVEEEEEEEEEWWWWWWWWWWWWWWIIIIIIIIPPPPPPPNNNNNNNNNNNNNNNNVVVVVVVKKKKKKKKKSSSSSSSSSSSSVVVVVVVCCCCCCDDDDDDDDIIIIIIIIAAAAAPPPPPPPKKKKKKKKKGGGGLLLLLLLLKKKKKKKKKMMMMMMMMAAAAASSSSSSTTTTTTTFFFFFFFFFFFIIIIIIIIGGGGNNNNNNNNSSSSSSTTTTTTTSSSSSSIIIIIIIIQQQQQQQQQEEEEEEEEEMMMMMMMMFFFFFFFFFFFRRRRRRRRRRRRRRRRRRRRRRVVVVVVVSSSSSSEEEEEEEEEQQQQQQQQQFFFFFFFFFFFTTTTTTTAAAAAMMMMMMMMFFFFFFFFFFFRRRRRRRRRRRRRRRRRRRRRRKKKKKKKKKAAAAAFFFFFFFFFFFLLLLLLLLHHHHHHHHHHWWWWWWWWWWWWWWYYYYYYYYYYYYTTTTTTTGGGGEEEEEEEEEGGGGMMMMMMMMDDDDDDDDEEEEEEEEEMMMMMMMMEEEEEEEEEFFFFFFFFFFFTTTTTTTEEEEEEEEEAAAAAEEEEEEEEESSSSSSNNNNNNNNMMMMMMMMNNNNNNNNDDDDDDDDLLLLLLLLVVVVVVVAAAAAEEEEEEEEEYYYYYYYYYYYYQQQQQQQQQQQQQQQQQQYYYYYYYYYYYYQQQQQQQQQDDDDDDDDAAAAATTTTTTTAAAAAGGGGEEEEEEEEEEEEEEEEEEEEEEEEEEEYYYYYYYYYYYYEEEEEEEEEEEEEEEEEEEEEEEEEEEEEEEEEEEEEEEEEEEEEEEEEEEEEEYYYYYYYYYYYYEEEEEEEEETTTTTTTT

SEQ ID NO: 174 - protein, 3488 aa, Caenorhabditis elegans
MMMMMMMMRRRRRRRRRRREEEEEEEEEIIIIIIIIVVVVVVVHHHHHHHHHHIIIIIIIIQQQQQQQQQAAAAAGGGGQQQQQQQQQCCCCCCGGGGNNNNNNNNQQQQQQQQQIIIIIIIIGGGGAAAAAKKKKKKKKKFFFFFFFFFFFWWWWWWWWWWWWWWEEEEEEEEEVVVVVVVIIIIIIIISSSSSSDDDDDDDDEEEEEEEEEHHHHHHHHHHGGGGIIIIIIIIDDDDDDDDPPPPPPPTTTTTTTGGGGAAAAAYYYYYYYYYYYYNNNNNNNNGGGGDDDDDDDDSSSSSSDDDDDDDDLLLLLLLLQQQQQQQQQLLLLLLLLEEEEEEEEERRRRRRRRRRRIIIIIIIINNNNNNNNVVVVVVVYYYYYYYYYYYYYYYYYYYYYYYYNNNNNNNNEEEEEEEEEAAAAASSSSSSGGGGGGGGKKKKKKKKKYYYYYYYYYYYYVVVVVVVPPPPPPPRRRRRRRRRRRAAAAACCCCCCLLLLLLLLVVVVVVVDDDDDDDDLLLLLLLLEEEEEEEEEPPPPPPPGGGGTTTTTTTMMMMMMMMDDDDDDDDSSSSSSVVVVVVVRRRRRRRRRRRAAAAAGGGGPPPPPPPFFFFFFFFFFFGGGGQQQQQQQQQLLLLLLLLFFFFFFFFFFFRRRRRRRRRRRPPPPPPPDDDDDDDDNNNNNNNNFFFFFFFFFFFVVVVVVVFFFFFFFFFFFGGGGQQQQQQQQQSSSSSSGGGGAAAAAGGGGNNNNNNNNNNNNNNNNWWWWWWWWWWWWWWAAAAAKKKKKKKKKGGGGHHHHHHHHHHYYYYYYYYYYYYTTTTTTTEEEEEEEEEGGGGAAAAAEEEEEEEEELLLLLLLLVVVVVVVDDDDDDDDNNNNNNNNVVVVVVVLLLLLLLLDDDDDDDDVVVVVVVVVVVVVVRRRRRRRRRRRKKKKKKKKKEEEEEEEEEAAAAAEEEEEEEEESSSSSSCCCCCCDDDDDDDDCCCCCCLLLLLLLLQQQQQQQQQGGGGFFFFFFFFFFFQQQQQQQQQMMMMMMMMTTTTTTTHHHHHHHHHHSSSSSSLLLLLLLLGGGGGGGGGGGGTTTTTTTGGGGSSSSSSGGGGMMMMMMMMGGGGTTTTTTTLLLLLLLLLLLLLLLLIIIIIIIISSSSSSKKKKKKKKKIIIIIIIIRRRRRRRRRRREEEEEEEEEEEEEEEEEEYYYYYYYYYYYYPPPPPPPDDDDDDDDRRRRRRRRRRRIIIIIIIIMMMMMMMMMMMMMMMMTTTTTTTFFFFFFFFFFFSSSSSSVVVVVVVVVVVVVVPPPPPPPSSSSSSPPPPPPPKKKKKKKKKVVVVVVVSSSSSSDDDDDDDDTTTTTTTVVVVVVVVVVVVVVEEEEEEEEEPPPPPPPYYYYYYYYYYYYNNNNNNNNAAAAATTTTTTTLLLLLLLLSSSSSSVVVVVVVHHHHHHHHHHQQQQQQQQQLLLLLLLLVVVVVVVEEEEEEEEENNNNNNNNTTTTTTTDDDDDDDDEEEEEEEEETTTTTTTFFFFFFFFFFFCCCCCCIIIIIIIIDDDDDDDDNNNNNNNNEEEEEEEEEAAAAALLLLLLLLYYYYYYYYYYYYDDDDDDDDIIIIIIIICCCCCCFFFFFFFFFFFRRRRRRRRRRRTTTTTTTLLLLLLLLKKKKKKKKKLLLLLLLLTTTTTTTTTTTTTTPPPPPPPTTTTTTTYYYYYYYYYYYYGGGGDDDDDDDDLLLLLLLLNNNNNNNNHHHHHHHHHHLLLLLLLLVVVVVVVSSSSSSMMMMMMMMTTTTTTTMMMMMMMMSSSSSSGGGGVVVVVVVTTTTTTTTTTTTTTCCCCCCLLLLLLLLRRRRRRRRRRRFFFFFFFFFFFPPPPPPPGGGGQQQQQQQQQLLLLLLLLNNNNNNNNAAAAADDDDDDDDLLLLLLLLRRRRRRRRRRRKKKKKKKKKLLLLLLLLAAAAAVVVVVVVNNNNNNNNMMMMMMMMVVVVVVVPPPPPPPFFFFFFFFFFFPPPPPPPRRRRRRRRRRRLLLLLLLLHHHHHHHHHHFFFFFFFFFFFFFFFFFFFFFFMMMMMMMMPPPPPPPGGGGFFFFFFFFFFFAAAAAPPPPPPPLLLLLLLLTTTTTTTSSSSSSRRRRRRRRRRRGGGGSSSSSSQQQQQQQQQQQQQQQQQQYYYYYYYYYYYYRRRRRRRRRRRSSSSSSLLLLLLLLTTTTTTTVVVVVVVPPPPPPPEEEEEEEEELLLLLLLLTTTTTTTQQQQQQQQQQQQQQQQQQMMMMMMMMFFFFFFFFFFFDDDDDDDDAAAAAKKKKKKKKKNNNNNNNNMMMMMMMMMMMMMMMMAAAAAAAAAACCCCCCDDDDDDDDPPPPPPPRRRRRRRRRRRHHHHHHHHHHGGGGRRRRRRRRRRRYYYYYYYYYYYYLLLLLLLLTTTTTTTVVVVVVVAAAAAAAAAAMMMMMMMMFFFFFFFFFFFRRRRRRRRRRRGGGGRRRRRRRRRRRMMMMMMMMSSSSSSMMMMMMMMKKKKKKKKKEEEEEEEEEVVVVVVVDDDDDDDDEEEEEEEEEQQQQQQQQQMMMMMMMMLLLLLLLLNNNNNNNNVVVVVVVQQQQQQQQQNNNNNNNNKKKKKKKKKNNNNNNNNSSSSSSSSSSSSYYYYYYYYYYYYFFFFFFFFFFFVVVVVVVEEEEEEEEEWWWWWWWWWWWWWWIIIIIIIIPPPPPPPNNNNNNNNNNNNNNNNVVVVVVVKKKKKKKKKTTTTTTTAAAAAVVVVVVVCCCCCCDDDDDDDDIIIIIIIIPPPPPPPPPPPPPPRRRRRRRRRRRGGGGVVVVVVVKKKKKKKKKMMMMMMMMAAAAAAAAAATTTTTTTFFFFFFFFFFFVVVVVVVGGGGNNNNNNNNSSSSSSTTTTTTTAAAAAIIIIIIIIQQQQQQQQQEEEEEEEEELLLLLLLLFFFFFFFFFFFKKKKKKKKKRRRRRRRRRRRIIIIIIIISSSSSSEEEEEEEEEQQQQQQQQQFFFFFFFFFFFTTTTTTTAAAAAMMMMMMMMFFFFFFFFFFFRRRRRRRRRRRRRRRRRRRRRRKKKKKKKKKAAAAAFFFFFFFFFFFLLLLLLLLHHHHHHHHHHWWWWWWWWWWWWWWYYYYYYYYYYYYTTTTTTTGGGGEEEEEEEEEGGGGMMMMMMMMDDDDDDDDEEEEEEEEEMMMMMMMMEEEEEEEEEFFFFFFFFFFFTTTTTTTEEEEEEEEEAAAAAEEEEEEEEESSSSSSNNNNNNNNMMMMMMMMNNNNNNNNDDDDDDDDLLLLLLLLVVVVVVVSSSSSSEEEEEEEEEYYYYYYYYYYYYQQQQQQQQQQQQQQQQQQYYYYYYYYYYYYQQQQQQQQQEEEEEEEEEAAAAATTTTTTTAAAAADDDDDDDDDDDDDDDDEEEEEEEEEGGGGEEEEEEEEEFFFFFFFFFFFDDDDDDDDEEEEEEEEEHHHHHHHHHHDDDDDDDDQQQQQQQQQDDDDDDDDVVVVVVVEEEEEEEEEE

SEQ ID NO: 175 - protein, 3536 aa, Gallus gallus
MMMMMMMMRRRRRRRRRRREEEEEEEEEIIIIIIIIVVVVVVVHHHHHHHHHHIIIIIIIIQQQQQQQQQAAAAAGGGGQQQQQQQQQCCCCCCGGGGNNNNNNNNQQQQQQQQQIIIIIIIIGGGGAAAAAKKKKKKKKKFFFFFFFFFFFWWWWWWWWWWWWWWEEEEEEEEEVVVVVVVIIIIIIIISSSSSSDDDDDDDDEEEEEEEEEHHHHHHHHHHGGGGIIIIIIIIDDDDDDDDPPPPPPPSSSSSSGGGGNNNNNNNNYYYYYYYYYYYYVVVVVVVGGGGDDDDDDDDSSSSSSDDDDDDDDLLLLLLLLQQQQQQQQQLLLLLLLLEEEEEEEEERRRRRRRRRRRIIIIIIIISSSSSSVVVVVVVYYYYYYYYYYYYYYYYYYYYYYYYNNNNNNNNEEEEEEEEEAAAAASSSSSSSSSSSSHHHHHHHHHHKKKKKKKKKYYYYYYYYYYYYVVVVVVVPPPPPPPRRRRRRRRRRRAAAAAIIIIIIIILLLLLLLLVVVVVVVDDDDDDDDLLLLLLLLEEEEEEEEEPPPPPPPGGGGTTTTTTTMMMMMMMMDDDDDDDDSSSSSSVVVVVVVRRRRRRRRRRRSSSSSSGGGGAAAAAFFFFFFFFFFFGGGGHHHHHHHHHHLLLLLLLLFFFFFFFFFFFRRRRRRRRRRRPPPPPPPDDDDDDDDNNNNNNNNFFFFFFFFFFFIIIIIIIIFFFFFFFFFFFGGGGQQQQQQQQQSSSSSSGGGGAAAAAGGGGNNNNNNNNNNNNNNNNWWWWWWWWWWWWWWAAAAAKKKKKKKKKGGGGHHHHHHHHHHYYYYYYYYYYYYTTTTTTTEEEEEEEEEGGGGAAAAAEEEEEEEEELLLLLLLLVVVVVVVDDDDDDDDSSSSSSVVVVVVVLLLLLLLLDDDDDDDDVVVVVVVVVVVVVVRRRRRRRRRRRKKKKKKKKKEEEEEEEEECCCCCCEEEEEEEEENNNNNNNNCCCCCCDDDDDDDDCCCCCCLLLLLLLLQQQQQQQQQGGGGFFFFFFFFFFFQQQQQQQQQLLLLLLLLTTTTTTTHHHHHHHHHHSSSSSSLLLLLLLLGGGGGGGGGGGGTTTTTTTGGGGSSSSSSGGGGMMMMMMMMGGGGTTTTTTTLLLLLLLLLLLLLLLLIIIIIIIISSSSSSKKKKKKKKKVVVVVVVRRRRRRRRRRREEEEEEEEEEEEEEEEEEYYYYYYYYYYYYPPPPPPPDDDDDDDDRRRRRRRRRRRIIIIIIIIMMMMMMMMNNNNNNNNTTTTTTTFFFFFFFFFFFSSSSSSVVVVVVVVVVVVVVPPPPPPPSSSSSSPPPPPPPKKKKKKKKKVVVVVVVSSSSSSDDDDDDDDTTTTTTTVVVVVVVVVVVVVVEEEEEEEEEPPPPPPPYYYYYYYYYYYYNNNNNNNNAAAAATTTTTTTLLLLLLLLSSSSSSIIIIIIIIHHHHHHHHHHQQQQQQQQQLLLLLLLLVVVVVVVEEEEEEEEENNNNNNNNTTTTTTTDDDDDDDDEEEEEEEEETTTTTTTYYYYYYYYYYYYCCCCCCIIIIIIIIDDDDDDDDNNNNNNNNEEEEEEEEEAAAAALLLLLLLLYYYYYYYYYYYYDDDDDDDDIIIIIIIICCCCCCFFFFFFFFFFFRRRRRRRRRRRTTTTTTTLLLLLLLLKKKKKKKKKLLLLLLLLAAAAATTTTTTTPPPPPPPTTTTTTTYYYYYYYYYYYYGGGGDDDDDDDDLLLLLLLLNNNNNNNNHHHHHHHHHHLLLLLLLLVVVVVVVSSSSSSAAAAATTTTTTTMMMMMMMMSSSSSSGGGGVVVVVVVTTTTTTTTTTTTTTSSSSSSLLLLLLLLRRRRRRRRRRRFFFFFFFFFFFPPPPPPPGGGGQQQQQQQQQLLLLLLLLNNNNNNNNAAAAADDDDDDDDLLLLLLLLRRRRRRRRRRRKKKKKKKKKLLLLLLLLAAAAAVVVVVVVNNNNNNNNMMMMMMMMVVVVVVVPPPPPPPFFFFFFFFFFFPPPPPPPRRRRRRRRRRRLLLLLLLLHHHHHHHHHHFFFFFFFFFFFFFFFFFFFFFFMMMMMMMMPPPPPPPGGGGFFFFFFFFFFFAAAAAPPPPPPPLLLLLLLLTTTTTTTRRRRRRRRRRRRRRRRRRRRRRGGGGSSSSSSQQQQQQQQQQQQQQQQQQYYYYYYYYYYYYRRRRRRRRRRRAAAAALLLLLLLLTTTTTTTVVVVVVVPPPPPPPEEEEEEEEELLLLLLLLTTTTTTTQQQQQQQQQQQQQQQQQQMMMMMMMMFFFFFFFFFFFDDDDDDDDAAAAAKKKKKKKKKNNNNNNNNMMMMMMMMMMMMMMMMAAAAAAAAAACCCCCCDDDDDDDDPPPPPPPRRRRRRRRRRRHHHHHHHHHHGGGGRRRRRRRRRRRYYYYYYYYYYYYLLLLLLLLTTTTTTTVVVVVVVAAAAATTTTTTTVVVVVVVFFFFFFFFFFFRRRRRRRRRRRGGGGRRRRRRRRRRRMMMMMMMMSSSSSSMMMMMMMMKKKKKKKKKEEEEEEEEEVVVVVVVDDDDDDDDEEEEEEEEEQQQQQQQQQMMMMMMMMLLLLLLLLAAAAAIIIIIIIIQQQQQQQQQSSSSSSKKKKKKKKKNNNNNNNNSSSSSSSSSSSSYYYYYYYYYYYYFFFFFFFFFFFVVVVVVVEEEEEEEEEWWWWWWWWWWWWWWIIIIIIIIPPPPPPPNNNNNNNNNNNNNNNNVVVVVVVKKKKKKKKKVVVVVVVAAAAAVVVVVVVCCCCCCDDDDDDDDIIIIIIIIPPPPPPPPPPPPPPRRRRRRRRRRRGGGGLLLLLLLLKKKKKKKKKMMMMMMMMSSSSSSSSSSSSTTTTTTTFFFFFFFFFFFIIIIIIIIGGGGNNNNNNNNSSSSSSTTTTTTTAAAAAIIIIIIIIQQQQQQQQQEEEEEEEEELLLLLLLLFFFFFFFFFFFKKKKKKKKKRRRRRRRRRRRIIIIIIIISSSSSSEEEEEEEEEQQQQQQQQQFFFFFFFFFFFTTTTTTTAAAAAMMMMMMMMFFFFFFFFFFFRRRRRRRRRRRRRRRRRRRRRRKKKKKKKKKAAAAAFFFFFFFFFFFLLLLLLLLHHHHHHHHHHWWWWWWWWWWWWWWYYYYYYYYYYYYTTTTTTTGGGGEEEEEEEEEGGGGMMMMMMMMDDDDDDDDEEEEEEEEEMMMMMMMMEEEEEEEEEFFFFFFFFFFFTTTTTTTEEEEEEEEEAAAAAEEEEEEEEESSSSSSNNNNNNNNMMMMMMMMNNNNNNNNDDDDDDDDLLLLLLLLVVVVVVVSSSSSSEEEEEEEEEYYYYYYYYYYYYQQQQQQQQQQQQQQQQQQYYYYYYYYYYYYQQQQQQQQQDDDDDDDDAAAAATTTTTTTAAAAAEEEEEEEEEEEEEEEEEEEEEEEEEEEGGGGEEEEEEEEEMMMMMMMMYYYYYYYYYYYYEEEEEEEEEDDDDDDDDDDDDDDDDEEEEEEEEEEEEEEEEEEEEEEEEEEESSSSSSEEEEEEEEEQQQQQQQQQGGGGAAAAAKKKKKKKKKK

SEQ ID NO: 176 - protein, 3509 aa, Eleusine indica
MMMMMMMMRRRRRRRRRRREEEEEEEEEIIIIIIIILLLLLLLLHHHHHHHHHHIIIIIIIIQQQQQQQQQGGGGGGGGQQQQQQQQQCCCCCCGGGGNNNNNNNNQQQQQQQQQIIIIIIIIGGGGSSSSSSKKKKKKKKKFFFFFFFFFFFWWWWWWWWWWWWWWEEEEEEEEEVVVVVVVVVVVVVVCCCCCCDDDDDDDDEEEEEEEEEHHHHHHHHHHGGGGIIIIIIIIDDDDDDDDPPPPPPPTTTTTTTGGGGRRRRRRRRRRRYYYYYYYYYYYYVVVVVVVGGGGTTTTTTTSSSSSSDDDDDDDDLLLLLLLLQQQQQQQQQLLLLLLLLEEEEEEEEERRRRRRRRRRRVVVVVVVNNNNNNNNVVVVVVVYYYYYYYYYYYYYYYYYYYYYYYYNNNNNNNNEEEEEEEEEAAAAASSSSSSCCCCCCGGGGRRRRRRRRRRRFFFFFFFFFFFVVVVVVVPPPPPPPRRRRRRRRRRRAAAAAVVVVVVVLLLLLLLLMMMMMMMMDDDDDDDDLLLLLLLLEEEEEEEEEPPPPPPPGGGGTTTTTTTMMMMMMMMDDDDDDDDSSSSSSVVVVVVVRRRRRRRRRRRTTTTTTTGGGGPPPPPPPYYYYYYYYYYYYGGGGQQQQQQQQQIIIIIIIIFFFFFFFFFFFRRRRRRRRRRRPPPPPPPDDDDDDDDNNNNNNNNFFFFFFFFFFFVVVVVVVFFFFFFFFFFFGGGGQQQQQQQQQSSSSSSGGGGAAAAAGGGGNNNNNNNNNNNNNNNNWWWWWWWWWWWWWWAAAAAKKKKKKKKKGGGGHHHHHHHHHHYYYYYYYYYYYYTTTTTTTEEEEEEEEEGGGGAAAAAEEEEEEEEELLLLLLLLIIIIIIIIDDDDDDDDSSSSSSVVVVVVVLLLLLLLLDDDDDDDDVVVVVVVVVVVVVVRRRRRRRRRRRKKKKKKKKKEEEEEEEEEAAAAAEEEEEEEEENNNNNNNNCCCCCCDDDDDDDDCCCCCCLLLLLLLLQQQQQQQQQGGGGFFFFFFFFFFFQQQQQQQQQVVVVVVVCCCCCCHHHHHHHHHHSSSSSSLLLLLLLLGGGGGGGGGGGGTTTTTTTGGGGSSSSSSGGGGMMMMMMMMGGGGTTTTTTTLLLLLLLLLLLLLLLLIIIIIIIISSSSSSKKKKKKKKKIIIIIIIIRRRRRRRRRRREEEEEEEEEEEEEEEEEEYYYYYYYYYYYYPPPPPPPDDDDDDDDRRRRRRRRRRRMMMMMMMMMMMMMMMMLLLLLLLLTTTTTTTFFFFFFFFFFFSSSSSSVVVVVVVFFFFFFFFFFFPPPPPPPSSSSSSPPPPPPPKKKKKKKKKVVVVVVVSSSSSSDDDDDDDDTTTTTTTVVVVVVVVVVVVVVEEEEEEEEEPPPPPPPYYYYYYYYYYYYNNNNNNNNAAAAATTTTTTTLLLLLLLLSSSSSSVVVVVVVHHHHHHHHHHQQQQQQQQQLLLLLLLLVVVVVVVEEEEEEEEENNNNNNNNAAAAADDDDDDDDEEEEEEEEECCCCCCMMMMMMMMVVVVVVVLLLLLLLLDDDDDDDDNNNNNNNNEEEEEEEEEAAAAALLLLLLLLYYYYYYYYYYYYDDDDDDDDIIIIIIIICCCCCCFFFFFFFFFFFRRRRRRRRRRRTTTTTTTLLLLLLLLKKKKKKKKKLLLLLLLLTTTTTTTTTTTTTTPPPPPPPSSSSSSFFFFFFFFFFFGGGGDDDDDDDDLLLLLLLLNNNNNNNNHHHHHHHHHHLLLLLLLLIIIIIIIISSSSSSAAAAATTTTTTTMMMMMMMMSSSSSSGGGGVVVVVVVTTTTTTTCCCCCCCCCCCCLLLLLLLLRRRRRRRRRRRFFFFFFFFFFFPPPPPPPGGGGQQQQQQQQQLLLLLLLLNNNNNNNNSSSSSSDDDDDDDDLLLLLLLLRRRRRRRRRRRKKKKKKKKKLLLLLLLLAAAAAVVVVVVVNNNNNNNNLLLLLLLLIIIIIIIIPPPPPPPFFFFFFFFFFFPPPPPPPRRRRRRRRRRRLLLLLLLLHHHHHHHHHHFFFFFFFFFFFFFFFFFFFFFFMMMMMMMMVVVVVVVGGGGFFFFFFFFFFFAAAAAPPPPPPPLLLLLLLLTTTTTTTSSSSSSRRRRRRRRRRRGGGGSSSSSSQQQQQQQQQQQQQQQQQQYYYYYYYYYYYYRRRRRRRRRRRAAAAALLLLLLLLTTTTTTTVVVVVVVPPPPPPPEEEEEEEEELLLLLLLLTTTTTTTQQQQQQQQQQQQQQQQQQMMMMMMMMWWWWWWWWWWWWWWDDDDDDDDAAAAAKKKKKKKKKNNNNNNNNMMMMMMMMMMMMMMMMCCCCCCAAAAAAAAAADDDDDDDDPPPPPPPRRRRRRRRRRRHHHHHHHHHHGGGGRRRRRRRRRRRYYYYYYYYYYYYLLLLLLLLTTTTTTTAAAAASSSSSSAAAAAMMMMMMMMFFFFFFFFFFFRRRRRRRRRRRGGGGKKKKKKKKKMMMMMMMMSSSSSSTTTTTTTKKKKKKKKKEEEEEEEEEVVVVVVVDDDDDDDDEEEEEEEEEQQQQQQQQQMMMMMMMMIIIIIIIINNNNNNNNVVVVVVVQQQQQQQQQNNNNNNNNKKKKKKKKKNNNNNNNNSSSSSSSSSSSSYYYYYYYYYYYYFFFFFFFFFFFVVVVVVVEEEEEEEEEWWWWWWWWWWWWWWIIIIIIIIPPPPPPPNNNNNNNNNNNNNNNNVVVVVVVKKKKKKKKKSSSSSSSSSSSSVVVVVVVCCCCCCDDDDDDDDIIIIIIIIPPPPPPPPPPPPPPRRRRRRRRRRRGGGGLLLLLLLLSSSSSSMMMMMMMMAAAAASSSSSSTTTTTTTFFFFFFFFFFFIIIIIIIIGGGGNNNNNNNNSSSSSSTTTTTTTSSSSSSIIIIIIIIQQQQQQQQQEEEEEEEEEMMMMMMMMFFFFFFFFFFFRRRRRRRRRRRRRRRRRRRRRRVVVVVVVSSSSSSEEEEEEEEEQQQQQQQQQFFFFFFFFFFFTTTTTTTAAAAAMMMMMMMMFFFFFFFFFFFRRRRRRRRRRRRRRRRRRRRRRKKKKKKKKKAAAAAFFFFFFFFFFFLLLLLLLLHHHHHHHHHHWWWWWWWWWWWWWWYYYYYYYYYYYYTTTTTTTGGGGEEEEEEEEEGGGGMMMMMMMMDDDDDDDDEEEEEEEEEMMMMMMMMEEEEEEEEEFFFFFFFFFFFTTTTTTTEEEEEEEEEAAAAAEEEEEEEEESSSSSSNNNNNNNNMMMMMMMMNNNNNNNNDDDDDDDDLLLLLLLLVVVVVVVSSSSSSEEEEEEEEEYYYYYYYYYYYYQQQQQQQQQQQQQQQQQQYYYYYYYYYYYYQQQQQQQQQDDDDDDDDAAAAATTTTTTTAAAAADDDDDDDDEEEEEEEEEEEEEEEEEEGGGGDDDDDDDDYYYYYYYYYYYYEEEEEEEEEDDDDDDDDEEEEEEEEEDDDDDDDDEEEEEEEEEAAAAALLLLLLLLHHHHHHHHHHDDDDDDDDEEEEEEEEEE

SEQ ID NO: 177 - protein, 3537 aa, Homo sapiens
MMMMMMMMRRRRRRRRRRREEEEEEEEEIIIIIIIIVVVVVVVHHHHHHHHHHIIIIIIIIQQQQQQQQQAAAAAGGGGQQQQQQQQQCCCCCCGGGGNNNNNNNNQQQQQQQQQIIIIIIIIGGGGAAAAAKKKKKKKKKFFFFFFFFFFFWWWWWWWWWWWWWWEEEEEEEEEVVVVVVVIIIIIIIISSSSSSDDDDDDDDEEEEEEEEEHHHHHHHHHHGGGGIIIIIIIIDDDDDDDDPPPPPPPSSSSSSGGGGNNNNNNNNYYYYYYYYYYYYVVVVVVVGGGGDDDDDDDDSSSSSSDDDDDDDDLLLLLLLLQQQQQQQQQLLLLLLLLEEEEEEEEERRRRRRRRRRRIIIIIIIISSSSSSVVVVVVVYYYYYYYYYYYYYYYYYYYYYYYYNNNNNNNNEEEEEEEEEAAAAASSSSSSSSSSSSHHHHHHHHHHKKKKKKKKKYYYYYYYYYYYYVVVVVVVPPPPPPPRRRRRRRRRRRAAAAAIIIIIIIILLLLLLLLVVVVVVVDDDDDDDDLLLLLLLLEEEEEEEEEPPPPPPPGGGGTTTTTTTMMMMMMMMDDDDDDDDSSSSSSVVVVVVVRRRRRRRRRRRSSSSSSGGGGAAAAAFFFFFFFFFFFGGGGHHHHHHHHHHLLLLLLLLFFFFFFFFFFFRRRRRRRRRRRPPPPPPPDDDDDDDDNNNNNNNNFFFFFFFFFFFIIIIIIIIFFFFFFFFFFFGGGGQQQQQQQQQSSSSSSGGGGAAAAAGGGGNNNNNNNNNNNNNNNNWWWWWWWWWWWWWWAAAAAKKKKKKKKKGGGGHHHHHHHHHHYYYYYYYYYYYYTTTTTTTEEEEEEEEEGGGGAAAAAEEEEEEEEELLLLLLLLVVVVVVVDDDDDDDDSSSSSSVVVVVVVLLLLLLLLDDDDDDDDVVVVVVVVVVVVVVRRRRRRRRRRRKKKKKKKKKEEEEEEEEECCCCCCEEEEEEEEENNNNNNNNCCCCCCDDDDDDDDCCCCCCLLLLLLLLQQQQQQQQQGGGGFFFFFFFFFFFQQQQQQQQQLLLLLLLLTTTTTTTHHHHHHHHHHSSSSSSLLLLLLLLGGGGGGGGGGGGTTTTTTTGGGGSSSSSSGGGGMMMMMMMMGGGGTTTTTTTLLLLLLLLLLLLLLLLIIIIIIIISSSSSSKKKKKKKKKVVVVVVVRRRRRRRRRRREEEEEEEEEEEEEEEEEEYYYYYYYYYYYYPPPPPPPDDDDDDDDRRRRRRRRRRRIIIIIIIIMMMMMMMMNNNNNNNNTTTTTTTFFFFFFFFFFFSSSSSSVVVVVVVVVVVVVVPPPPPPPSSSSSSPPPPPPPKKKKKKKKKVVVVVVVSSSSSSDDDDDDDDTTTTTTTVVVVVVVVVVVVVVEEEEEEEEEPPPPPPPYYYYYYYYYYYYNNNNNNNNAAAAATTTTTTTLLLLLLLLSSSSSSIIIIIIIIHHHHHHHHHHQQQQQQQQQLLLLLLLLVVVVVVVEEEEEEEEENNNNNNNNTTTTTTTDDDDDDDDEEEEEEEEETTTTTTTYYYYYYYYYYYYCCCCCCIIIIIIIIDDDDDDDDNNNNNNNNEEEEEEEEEAAAAALLLLLLLLYYYYYYYYYYYYDDDDDDDDIIIIIIIICCCCCCFFFFFFFFFFFRRRRRRRRRRRTTTTTTTLLLLLLLLKKKKKKKKKLLLLLLLLAAAAATTTTTTTPPPPPPPTTTTTTTYYYYYYYYYYYYGGGGDDDDDDDDLLLLLLLLNNNNNNNNHHHHHHHHHHLLLLLLLLVVVVVVVSSSSSSAAAAATTTTTTTMMMMMMMMSSSSSSGGGGVVVVVVVTTTTTTTTTTTTTTSSSSSSLLLLLLLLRRRRRRRRRRRFFFFFFFFFFFPPPPPPPGGGGQQQQQQQQQLLLLLLLLNNNNNNNNAAAAADDDDDDDDLLLLLLLLRRRRRRRRRRRKKKKKKKKKLLLLLLLLAAAAAVVVVVVVNNNNNNNNMMMMMMMMVVVVVVVPPPPPPPFFFFFFFFFFFPPPPPPPRRRRRRRRRRRLLLLLLLLHHHHHHHHHHFFFFFFFFFFFFFFFFFFFFFFMMMMMMMMPPPPPPPGGGGFFFFFFFFFFFAAAAAPPPPPPPLLLLLLLLTTTTTTTAAAAARRRRRRRRRRRGGGGSSSSSSQQQQQQQQQQQQQQQQQQYYYYYYYYYYYYRRRRRRRRRRRAAAAALLLLLLLLTTTTTTTVVVVVVVPPPPPPPEEEEEEEEELLLLLLLLTTTTTTTQQQQQQQQQQQQQQQQQQMMMMMMMMFFFFFFFFFFFDDDDDDDDAAAAAKKKKKKKKKNNNNNNNNMMMMMMMMMMMMMMMMAAAAAAAAAACCCCCCDDDDDDDDPPPPPPPRRRRRRRRRRRHHHHHHHHHHGGGGRRRRRRRRRRRYYYYYYYYYYYYLLLLLLLLTTTTTTTVVVVVVVAAAAATTTTTTTVVVVVVVFFFFFFFFFFFRRRRRRRRRRRGGGGRRRRRRRRRRRMMMMMMMMSSSSSSMMMMMMMMKKKKKKKKKEEEEEEEEEVVVVVVVDDDDDDDDEEEEEEEEEQQQQQQQQQMMMMMMMMLLLLLLLLAAAAAIIIIIIIIQQQQQQQQQSSSSSSKKKKKKKKKNNNNNNNNSSSSSSSSSSSSYYYYYYYYYYYYFFFFFFFFFFFVVVVVVVEEEEEEEEEWWWWWWWWWWWWWWIIIIIIIIPPPPPPPNNNNNNNNNNNNNNNNVVVVVVVKKKKKKKKKVVVVVVVAAAAAVVVVVVVCCCCCCDDDDDDDDIIIIIIIIPPPPPPPPPPPPPPRRRRRRRRRRRGGGGLLLLLLLLKKKKKKKKKMMMMMMMMSSSSSSSSSSSSTTTTTTTFFFFFFFFFFFIIIIIIIIGGGGNNNNNNNNSSSSSSTTTTTTTAAAAAIIIIIIIIQQQQQQQQQEEEEEEEEELLLLLLLLFFFFFFFFFFFKKKKKKKKKRRRRRRRRRRRIIIIIIIISSSSSSEEEEEEEEEQQQQQQQQQFFFFFFFFFFFTTTTTTTAAAAAMMMMMMMMFFFFFFFFFFFRRRRRRRRRRRRRRRRRRRRRRKKKKKKKKKAAAAAFFFFFFFFFFFLLLLLLLLHHHHHHHHHHWWWWWWWWWWWWWWYYYYYYYYYYYYTTTTTTTGGGGEEEEEEEEEGGGGMMMMMMMMDDDDDDDDEEEEEEEEEMMMMMMMMEEEEEEEEEFFFFFFFFFFFTTTTTTTEEEEEEEEEAAAAAEEEEEEEEESSSSSSNNNNNNNNMMMMMMMMNNNNNNNNDDDDDDDDLLLLLLLLVVVVVVVSSSSSSEEEEEEEEEYYYYYYYYYYYYQQQQQQQQQQQQQQQQQQYYYYYYYYYYYYQQQQQQQQQDDDDDDDDAAAAATTTTTTTAAAAAEEEEEEEEEEEEEEEEEEEEEEEEEEEGGGGEEEEEEEEEMMMMMMMMYYYYYYYYYYYYEEEEEEEEEDDDDDDDDDDDDDDDDEEEEEEEEEEEEEEEEEEEEEEEEEEESSSSSSEEEEEEEEEAAAAAQQQQQQQQQGGGGPPPPPPPKKKKKKKKKK

SEQ ID NO: 178 - protein, 3509 aa, Zea mays
MMMMMMMMRRRRRRRRRRREEEEEEEEEIIIIIIIILLLLLLLLHHHHHHHHHHIIIIIIIIQQQQQQQQQGGGGGGGGQQQQQQQQQCCCCCCGGGGNNNNNNNNQQQQQQQQQIIIIIIIIGGGGAAAAAKKKKKKKKKFFFFFFFFFFFWWWWWWWWWWWWWWEEEEEEEEEVVVVVVVIIIIIIIICCCCCCGGGGEEEEEEEEEHHHHHHHHHHCCCCCCVVVVVVVDDDDDDDDSSSSSSTTTTTTTGGGGRRRRRRRRRRRYYYYYYYYYYYYSSSSSSGGGGTTTTTTTSSSSSSSSSSSSQQQQQQQQQQQQQQQQQQLLLLLLLLEEEEEEEEELLLLLLLLEEEEEEEEERRRRRRRRRRRIIIIIIIINNNNNNNNVVVVVVVYYYYYYYYYYYYYYYYYYYYYYYYNNNNNNNNEEEEEEEEEAAAAAGGGGGGGGGGGGRRRRRRRRRRRYYYYYYYYYYYYVVVVVVVPPPPPPPRRRRRRRRRRRAAAAAVVVVVVVLLLLLLLLMMMMMMMMDDDDDDDDLLLLLLLLEEEEEEEEEPPPPPPPGGGGTTTTTTTMMMMMMMMEEEEEEEEESSSSSSIIIIIIIIRRRRRRRRRRRAAAAAGGGGPPPPPPPFFFFFFFFFFFGGGGGGGGIIIIIIIIFFFFFFFFFFFRRRRRRRRRRRPPPPPPPDDDDDDDDNNNNNNNNFFFFFFFFFFFVVVVVVVYYYYYYYYYYYYGGGGQQQQQQQQQSSSSSSGGGGAAAAAGGGGNNNNNNNNNNNNNNNNWWWWWWWWWWWWWWAAAAAKKKKKKKKKGGGGHHHHHHHHHHYYYYYYYYYYYYTTTTTTTEEEEEEEEEGGGGAAAAAEEEEEEEEELLLLLLLLIIIIIIIIDDDDDDDDSSSSSSVVVVVVVLLLLLLLLDDDDDDDDVVVVVVVVVVVVVVRRRRRRRRRRRKKKKKKKKKEEEEEEEEEAAAAAEEEEEEEEENNNNNNNNCCCCCCDDDDDDDDCCCCCCLLLLLLLLQQQQQQQQQGGGGFFFFFFFFFFFQQQQQQQQQVVVVVVVCCCCCCHHHHHHHHHHSSSSSSLLLLLLLLGGGGGGGGGGGGTTTTTTTGGGGSSSSSSGGGGMMMMMMMMGGGGTTTTTTTLLLLLLLLLLLLLLLLIIIIIIIISSSSSSKKKKKKKKKIIIIIIIIRRRRRRRRRRREEEEEEEEEEEEEEEEEEYYYYYYYYYYYYPPPPPPPDDDDDDDDRRRRRRRRRRRMMMMMMMMMMMMMMMMLLLLLLLLTTTTTTTFFFFFFFFFFFSSSSSSVVVVVVVFFFFFFFFFFFPPPPPPPSSSSSSPPPPPPPKKKKKKKKKVVVVVVVSSSSSSDDDDDDDDTTTTTTTVVVVVVVVVVVVVVEEEEEEEEEPPPPPPPYYYYYYYYYYYYNNNNNNNNAAAAATTTTTTTLLLLLLLLSSSSSSVVVVVVVHHHHHHHHHHQQQQQQQQQLLLLLLLLVVVVVVVEEEEEEEEENNNNNNNNAAAAADDDDDDDDEEEEEEEEECCCCCCMMMMMMMMVVVVVVVLLLLLLLLDDDDDDDDNNNNNNNNEEEEEEEEEAAAAALLLLLLLLYYYYYYYYYYYYDDDDDDDDIIIIIIIICCCCCCFFFFFFFFFFFRRRRRRRRRRRTTTTTTTLLLLLLLLKKKKKKKKKLLLLLLLLTTTTTTTNNNNNNNNPPPPPPPSSSSSSFFFFFFFFFFFGGGGDDDDDDDDLLLLLLLLNNNNNNNNHHHHHHHHHHLLLLLLLLIIIIIIIISSSSSSAAAAATTTTTTTMMMMMMMMSSSSSSGGGGVVVVVVVTTTTTTTCCCCCCCCCCCCLLLLLLLLRRRRRRRRRRRFFFFFFFFFFFPPPPPPPGGGGQQQQQQQQQLLLLLLLLNNNNNNNNSSSSSSDDDDDDDDLLLLLLLLRRRRRRRRRRRKKKKKKKKKLLLLLLLLAAAAAVVVVVVVNNNNNNNNLLLLLLLLIIIIIIIIPPPPPPPFFFFFFFFFFFPPPPPPPRRRRRRRRRRRLLLLLLLLHHHHHHHHHHFFFFFFFFFFFFFFFFFFFFFFMMMMMMMMVVVVVVVGGGGFFFFFFFFFFFAAAAAPPPPPPPLLLLLLLLTTTTTTTSSSSSSRRRRRRRRRRRGGGGSSSSSSQQQQQQQQQQQQQQQQQQYYYYYYYYYYYYRRRRRRRRRRRAAAAALLLLLLLLTTTTTTTVVVVVVVPPPPPPPEEEEEEEEELLLLLLLLTTTTTTTQQQQQQQQQQQQQQQQQQMMMMMMMMWWWWWWWWWWWWWWDDDDDDDDAAAAAKKKKKKKKKNNNNNNNNMMMMMMMMMMMMMMMMCCCCCCSSSSSSAAAAADDDDDDDDPPPPPPPRRRRRRRRRRRHHHHHHHHHHGGGGRRRRRRRRRRRYYYYYYYYYYYYLLLLLLLLTTTTTTTAAAAASSSSSSAAAAAMMMMMMMMFFFFFFFFFFFRRRRRRRRRRRGGGGKKKKKKKKKMMMMMMMMSSSSSSTTTTTTTKKKKKKKKKEEEEEEEEEVVVVVVVDDDDDDDDEEEEEEEEEQQQQQQQQQMMMMMMMMIIIIIIIINNNNNNNNVVVVVVVQQQQQQQQQNNNNNNNNKKKKKKKKKNNNNNNNNSSSSSSSSSSSSYYYYYYYYYYYYFFFFFFFFFFFVVVVVVVEEEEEEEEEWWWWWWWWWWWWWWIIIIIIIIPPPPPPPNNNNNNNNNNNNNNNNVVVVVVVKKKKKKKKKSSSSSSSSSSSSVVVVVVVCCCCCCDDDDDDDDIIIIIIIIPPPPPPPPPPPPPPVVVVVVVGGGGLLLLLLLLPPPPPPPMMMMMMMMAAAAASSSSSSTTTTTTTFFFFFFFFFFFVVVVVVVGGGGNNNNNNNNSSSSSSTTTTTTTSSSSSSIIIIIIIIQQQQQQQQQEEEEEEEEEMMMMMMMMFFFFFFFFFFFRRRRRRRRRRRRRRRRRRRRRRVVVVVVVSSSSSSEEEEEEEEEQQQQQQQQQFFFFFFFFFFFTTTTTTTAAAAAMMMMMMMMFFFFFFFFFFFRRRRRRRRRRRRRRRRRRRRRRKKKKKKKKKAAAAAFFFFFFFFFFFLLLLLLLLHHHHHHHHHHWWWWWWWWWWWWWWYYYYYYYYYYYYTTTTTTTSSSSSSEEEEEEEEEGGGGMMMMMMMMDDDDDDDDEEEEEEEEEMMMMMMMMEEEEEEEEEFFFFFFFFFFFTTTTTTTEEEEEEEEEAAAAAEEEEEEEEESSSSSSNNNNNNNNMMMMMMMMNNNNNNNNDDDDDDDDLLLLLLLLVVVVVVVAAAAAEEEEEEEEEYYYYYYYYYYYYQQQQQQQQQQQQQQQQQQYYYYYYYYYYYYQQQQQQQQQDDDDDDDDAAAAATTTTTTTAAAAAEEEEEEEEEEEEEEEEEEYYYYYYYYYYYYEEEEEEEEEEEEEEEEEEEEEEEEEEEEEEEEEEEEHHHHHHHHHHDDDDDDDDGGGGEEEEEEEEEEEEEEEEEEEEEEEEEEEHHHHHHHHHHAAAAAA

SEQ ID NO: 179 - protein, 3524 aa, Porphyra purpurea
MMMMMMMMRRRRRRRRRRREEEEEEEEEIIIIIIIIVVVVVVVHHHHHHHHHHIIIIIIIIQQQQQQQQQGGGGGGGGQQQQQQQQQCCCCCCGGGGDDDDDDDDQQQQQQQQQIIIIIIIIGGGGAAAAAKKKKKKKKKFFFFFFFFFFFWWWWWWWWWWWWWWEEEEEEEEEVVVVVVVIIIIIIIISSSSSSDDDDDDDDEEEEEEEEEHHHHHHHHHHGGGGIIIIIIIIDDDDDDDDPPPPPPPTTTTTTTGGGGTTTTTTTYYYYYYYYYYYYNNNNNNNNGGGGDDDDDDDDSSSSSSDDDDDDDDLLLLLLLLQQQQQQQQQLLLLLLLLEEEEEEEEERRRRRRRRRRRVVVVVVVNNNNNNNNVVVVVVVYYYYYYYYYYYYYYYYYYYYYYYYNNNNNNNNEEEEEEEEEAAAAATTTTTTTGGGGGGGGRRRRRRRRRRRYYYYYYYYYYYYVVVVVVVPPPPPPPRRRRRRRRRRRAAAAAVVVVVVVLLLLLLLLMMMMMMMMDDDDDDDDLLLLLLLLEEEEEEEEEPPPPPPPGGGGTTTTTTTMMMMMMMMDDDDDDDDSSSSSSVVVVVVVRRRRRRRRRRRAAAAAGGGGPPPPPPPYYYYYYYYYYYYGGGGQQQQQQQQQLLLLLLLLFFFFFFFFFFFRRRRRRRRRRRPPPPPPPDDDDDDDDNNNNNNNNFFFFFFFFFFFVVVVVVVFFFFFFFFFFFGGGGQQQQQQQQQTTTTTTTGGGGAAAAAGGGGNNNNNNNNNNNNNNNNWWWWWWWWWWWWWWAAAAAKKKKKKKKKGGGGHHHHHHHHHHYYYYYYYYYYYYTTTTTTTEEEEEEEEEGGGGAAAAAEEEEEEEEELLLLLLLLIIIIIIIIDDDDDDDDSSSSSSVVVVVVVLLLLLLLLDDDDDDDDVVVVVVVVVVVVVVRRRRRRRRRRRKKKKKKKKKEEEEEEEEEAAAAAEEEEEEEEEQQQQQQQQQCCCCCCDDDDDDDDCCCCCCLLLLLLLLQQQQQQQQQGGGGFFFFFFFFFFFQQQQQQQQQVVVVVVVTTTTTTTHHHHHHHHHHSSSSSSLLLLLLLLGGGGGGGGGGGGTTTTTTTGGGGSSSSSSGGGGMMMMMMMMGGGGTTTTTTTLLLLLLLLLLLLLLLLIIIIIIIISSSSSSKKKKKKKKKIIIIIIIIRRRRRRRRRRREEEEEEEEEEEEEEEEEEYYYYYYYYYYYYPPPPPPPDDDDDDDDRRRRRRRRRRRVVVVVVVMMMMMMMMMMMMMMMMTTTTTTTFFFFFFFFFFFSSSSSSVVVVVVVCCCCCCPPPPPPPSSSSSSPPPPPPPKKKKKKKKKVVVVVVVSSSSSSDDDDDDDDTTTTTTTVVVVVVVVVVVVVVEEEEEEEEEPPPPPPPYYYYYYYYYYYYNNNNNNNNAAAAATTTTTTTLLLLLLLLSSSSSSVVVVVVVHHHHHHHHHHQQQQQQQQQLLLLLLLLVVVVVVVEEEEEEEEENNNNNNNNAAAAADDDDDDDDEEEEEEEEEVVVVVVVMMMMMMMMVVVVVVVLLLLLLLLDDDDDDDDNNNNNNNNEEEEEEEEEAAAAALLLLLLLLYYYYYYYYYYYYDDDDDDDDIIIIIIIICCCCCCFFFFFFFFFFFRRRRRRRRRRRTTTTTTTLLLLLLLLKKKKKKKKKLLLLLLLLTTTTTTTTTTTTTTPPPPPPPTTTTTTTYYYYYYYYYYYYGGGGDDDDDDDDLLLLLLLLNNNNNNNNHHHHHHHHHHLLLLLLLLVVVVVVVCCCCCCVVVVVVVCCCCCCMMMMMMMMSSSSSSGGGGVVVVVVVTTTTTTTSSSSSSSSSSSSLLLLLLLLRRRRRRRRRRRFFFFFFFFFFFPPPPPPPGGGGQQQQQQQQQLLLLLLLLNNNNNNNNAAAAADDDDDDDDLLLLLLLLRRRRRRRRRRRKKKKKKKKKLLLLLLLLAAAAAVVVVVVVNNNNNNNNLLLLLLLLIIIIIIIIPPPPPPPFFFFFFFFFFFPPPPPPPRRRRRRRRRRRLLLLLLLLHHHHHHHHHHFFFFFFFFFFFFFFFFFFFFFFMMMMMMMMLLLLLLLLGGGGFFFFFFFFFFFAAAAAPPPPPPPLLLLLLLLTTTTTTTSSSSSSRRRRRRRRRRRGGGGSSSSSSQQQQQQQQQQQQQQQQQQYYYYYYYYYYYYRRRRRRRRRRRAAAAALLLLLLLLTTTTTTTVVVVVVVPPPPPPPEEEEEEEEELLLLLLLLTTTTTTTSSSSSSQQQQQQQQQCCCCCCFFFFFFFFFFFDDDDDDDDAAAAAKKKKKKKKKNNNNNNNNMMMMMMMMMMMMMMMMCCCCCCAAAAAAAAAADDDDDDDDPPPPPPPRRRRRRRRRRRHHHHHHHHHHGGGGRRRRRRRRRRRYYYYYYYYYYYYLLLLLLLLTTTTTTTAAAAASSSSSSCCCCCCMMMMMMMMFFFFFFFFFFFRRRRRRRRRRRGGGGRRRRRRRRRRRMMMMMMMMSSSSSSTTTTTTTKKKKKKKKKEEEEEEEEEVVVVVVVDDDDDDDDEEEEEEEEEQQQQQQQQQMMMMMMMMLLLLLLLLNNNNNNNNVVVVVVVQQQQQQQQQNNNNNNNNKKKKKKKKKNNNNNNNNSSSSSSSSSSSSYYYYYYYYYYYYFFFFFFFFFFFVVVVVVVEEEEEEEEEWWWWWWWWWWWWWWIIIIIIIIPPPPPPPNNNNNNNNNNNNNNNNIIIIIIIIKKKKKKKKKSSSSSSSSSSSSVVVVVVVCCCCCCDDDDDDDDIIIIIIIIPPPPPPPPPPPPPPKKKKKKKKKGGGGLLLLLLLLKKKKKKKKKMMMMMMMMSSSSSSAAAAATTTTTTTFFFFFFFFFFFVVVVVVVGGGGNNNNNNNNSSSSSSTTTTTTTAAAAAIIIIIIIIQQQQQQQQQEEEEEEEEEMMMMMMMMFFFFFFFFFFFKKKKKKKKKRRRRRRRRRRRVVVVVVVGGGGEEEEEEEEEQQQQQQQQQFFFFFFFFFFFTTTTTTTAAAAAMMMMMMMMFFFFFFFFFFFRRRRRRRRRRRRRRRRRRRRRRKKKKKKKKKAAAAAFFFFFFFFFFFLLLLLLLLHHHHHHHHHHWWWWWWWWWWWWWWYYYYYYYYYYYYTTTTTTTGGGGEEEEEEEEEGGGGMMMMMMMMDDDDDDDDEEEEEEEEEMMMMMMMMEEEEEEEEEFFFFFFFFFFFTTTTTTTEEEEEEEEEAAAAAEEEEEEEEESSSSSSNNNNNNNNMMMMMMMMNNNNNNNNDDDDDDDDLLLLLLLLVVVVVVVSSSSSSEEEEEEEEEYYYYYYYYYYYYQQQQQQQQQQQQQQQQQQYYYYYYYYYYYYQQQQQQQQQDDDDDDDDAAAAATTTTTTTAAAAAEEEEEEEEEEEEEEEEEEEEEEEEEEEGGGGEEEEEEEEEYYYYYYYYYYYYDDDDDDDDEEEEEEEEEDDDDDDDDDDDDDDDDGGGGGGGGYYYYYYYYYYYYGGGGDDDDDDDDEEEEEEEEEDDDDDDDDDDDDDDDDGGGGMMMMMMMMMMMMMMMMM

SEQ ID NO: 180 - protein, 3497 aa, Triticum aestivum
MMMMMMMMRRRRRRRRRRREEEEEEEEEIIIIIIIILLLLLLLLHHHHHHHHHHIIIIIIIIQQQQQQQQQGGGGGGGGQQQQQQQQQCCCCCCGGGGNNNNNNNNQQQQQQQQQIIIIIIIIGGGGAAAAAKKKKKKKKKFFFFFFFFFFFWWWWWWWWWWWWWWEEEEEEEEEVVVVVVVIIIIIIIICCCCCCDDDDDDDDEEEEEEEEEHHHHHHHHHHGGGGIIIIIIIIDDDDDDDDGGGGTTTTTTTGGGGRRRRRRRRRRRYYYYYYYYYYYYAAAAAGGGGDDDDDDDDSSSSSSDDDDDDDDLLLLLLLLQQQQQQQQQLLLLLLLLEEEEEEEEERRRRRRRRRRRIIIIIIIINNNNNNNNVVVVVVVYYYYYYYYYYYYYYYYYYYYYYYYNNNNNNNNEEEEEEEEEAAAAASSSSSSGGGGGGGGRRRRRRRRRRRFFFFFFFFFFFVVVVVVVPPPPPPPRRRRRRRRRRRAAAAAVVVVVVVLLLLLLLLMMMMMMMMDDDDDDDDLLLLLLLLEEEEEEEEEPPPPPPPGGGGTTTTTTTMMMMMMMMDDDDDDDDSSSSSSVVVVVVVRRRRRRRRRRRSSSSSSGGGGPPPPPPPFFFFFFFFFFFGGGGQQQQQQQQQIIIIIIIIFFFFFFFFFFFRRRRRRRRRRRPPPPPPPDDDDDDDDNNNNNNNNFFFFFFFFFFFVVVVVVVFFFFFFFFFFFGGGGQQQQQQQQQSSSSSSGGGGAAAAAGGGGNNNNNNNNNNNNNNNNWWWWWWWWWWWWWWAAAAAKKKKKKKKKGGGGHHHHHHHHHHYYYYYYYYYYYYTTTTTTTEEEEEEEEEGGGGAAAAAEEEEEEEEELLLLLLLLIIIIIIIIDDDDDDDDSSSSSSVVVVVVVLLLLLLLLDDDDDDDDVVVVVVVVVVVVVVRRRRRRRRRRRKKKKKKKKKEEEEEEEEEAAAAAEEEEEEEEENNNNNNNNCCCCCCDDDDDDDDCCCCCCLLLLLLLLQQQQQQQQQGGGGFFFFFFFFFFFQQQQQQQQQVVVVVVVCCCCCCHHHHHHHHHHSSSSSSLLLLLLLLGGGGGGGGGGGGTTTTTTTGGGGSSSSSSGGGGMMMMMMMMGGGGTTTTTTTLLLLLLLLLLLLLLLLIIIIIIIISSSSSSKKKKKKKKKIIIIIIIIRRRRRRRRRRREEEEEEEEEEEEEEEEEEYYYYYYYYYYYYPPPPPPPDDDDDDDDRRRRRRRRRRRMMMMMMMMMMMMMMMMLLLLLLLLTTTTTTTFFFFFFFFFFFSSSSSSVVVVVVVFFFFFFFFFFFPPPPPPPSSSSSSPPPPPPPKKKKKKKKKVVVVVVVSSSSSSDDDDDDDDTTTTTTTVVVVVVVVVVVVVVEEEEEEEEEPPPPPPPYYYYYYYYYYYYNNNNNNNNAAAAATTTTTTTLLLLLLLLSSSSSSVVVVVVVHHHHHHHHHHQQQQQQQQQLLLLLLLLVVVVVVVEEEEEEEEENNNNNNNNAAAAADDDDDDDDEEEEEEEEECCCCCCMMMMMMMMVVVVVVVLLLLLLLLDDDDDDDDNNNNNNNNEEEEEEEEEAAAAALLLLLLLLYYYYYYYYYYYYDDDDDDDDIIIIIIIICCCCCCFFFFFFFFFFFRRRRRRRRRRRTTTTTTTLLLLLLLLKKKKKKKKKLLLLLLLLAAAAATTTTTTTPPPPPPPSSSSSSFFFFFFFFFFFGGGGEEEEEEEEELLLLLLLLNNNNNNNNHHHHHHHHHHLLLLLLLLIIIIIIIISSSSSSAAAAATTTTTTTMMMMMMMMSSSSSSGGGGVVVVVVVTTTTTTTCCCCCCCCCCCCLLLLLLLLRRRRRRRRRRRFFFFFFFFFFFPPPPPPPGGGGQQQQQQQQQLLLLLLLLNNNNNNNNSSSSSSDDDDDDDDLLLLLLLLRRRRRRRRRRRKKKKKKKKKLLLLLLLLAAAAAVVVVVVVNNNNNNNNLLLLLLLLIIIIIIIIPPPPPPPFFFFFFFFFFFPPPPPPPRRRRRRRRRRRLLLLLLLLHHHHHHHHHHFFFFFFFFFFFFFFFFFFFFFFMMMMMMMMVVVVVVVGGGGFFFFFFFFFFFAAAAAPPPPPPPLLLLLLLLTTTTTTTSSSSSSRRRRRRRRRRRGGGGSSSSSSQQQQQQQQQMMMMMMMMYYYYYYYYYYYYRRRRRRRRRRRAAAAALLLLLLLLTTTTTTTVVVVVVVPPPPPPPEEEEEEEEELLLLLLLLTTTTTTTQQQQQQQQQQQQQQQQQQMMMMMMMMWWWWWWWWWWWWWWDDDDDDDDAAAAAKKKKKKKKKNNNNNNNNMMMMMMMMMMMMMMMMCCCCCCAAAAAAAAAADDDDDDDDPPPPPPPRRRRRRRRRRRHHHHHHHHHHGGGGRRRRRRRRRRRYYYYYYYYYYYYLLLLLLLLTTTTTTTAAAAASSSSSSAAAAACCCCCCFFFFFFFFFFFRRRRRRRRRRRGGGGKKKKKKKKKMMMMMMMMSSSSSSTTTTTTTKKKKKKKKKEEEEEEEEEVVVVVVVDDDDDDDDEEEEEEEEEQQQQQQQQQMMMMMMMMLLLLLLLLNNNNNNNNVVVVVVVQQQQQQQQQNNNNNNNNKKKKKKKKKNNNNNNNNSSSSSSSSSSSSYYYYYYYYYYYYFFFFFFFFFFFVVVVVVVEEEEEEEEEWWWWWWWWWWWWWWIIIIIIIIPPPPPPPNNNNNNNNNNNNNNNNVVVVVVVKKKKKKKKKSSSSSSSSSSSSVVVVVVVCCCCCCDDDDDDDDMMMMMMMMPPPPPPPPPPPPPPRRRRRRRRRRRGGGGLLLLLLLLKKKKKKKKKMMMMMMMMAAAAAGGGGTTTTTTTFFFFFFFFFFFVVVVVVVGGGGNNNNNNNNSSSSSSTTTTTTTSSSSSSIIIIIIIIQQQQQQQQQEEEEEEEEEMMMMMMMMFFFFFFFFFFFRRRRRRRRRRRRRRRRRRRRRRVVVVVVVSSSSSSEEEEEEEEEQQQQQQQQQFFFFFFFFFFFTTTTTTTAAAAAMMMMMMMMFFFFFFFFFFFRRRRRRRRRRRRRRRRRRRRRRKKKKKKKKKAAAAAFFFFFFFFFFFLLLLLLLLHHHHHHHHHHWWWWWWWWWWWWWWYYYYYYYYYYYYTTTTTTTGGGGEEEEEEEEEGGGGMMMMMMMMDDDDDDDDEEEEEEEEEMMMMMMMMEEEEEEEEEFFFFFFFFFFFTTTTTTTEEEEEEEEEAAAAAEEEEEEEEESSSSSSNNNNNNNNMMMMMMMMNNNNNNNNDDDDDDDDLLLLLLLLVVVVVVVAAAAAEEEEEEEEEYYYYYYYYYYYYQQQQQQQQQQQQQQQQQQYYYYYYYYYYYYQQQQQQQQQDDDDDDDDAAAAATTTTTTTAAAAADDDDDDDDEEEEEEEEEEEEEEEEEEYYYYYYYYYYYYDDDDDDDDEEEEEEEEEEEEEEEEEEEEEEEEEEEEEEEEEEEEEEEEEEEEEEEEEEEEEERRRRRRRRRRRDDDDDDDDAAAAAEEEEEEEEEE

SEQ ID NO: 181 - protein, 3495 aa, Xenopus laevis
MMMMMMMMRRRRRRRRRRREEEEEEEEEIIIIIIIIVVVVVVVHHHHHHHHHHLLLLLLLLQQQQQQQQQAAAAAGGGGQQQQQQQQQCCCCCCGGGGNNNNNNNNQQQQQQQQQIIIIIIIIGGGGAAAAAKKKKKKKKKFFFFFFFFFFFWWWWWWWWWWWWWWEEEEEEEEEVVVVVVVIIIIIIIISSSSSSDDDDDDDDEEEEEEEEEHHHHHHHHHHGGGGIIIIIIIIDDDDDDDDPPPPPPPTTTTTTTGGGGAAAAAYYYYYYYYYYYYHHHHHHHHHHGGGGDDDDDDDDSSSSSSDDDDDDDDLLLLLLLLQQQQQQQQQLLLLLLLLEEEEEEEEERRRRRRRRRRRIIIIIIIINNNNNNNNVVVVVVVYYYYYYYYYYYYYYYYYYYYYYYYNNNNNNNNEEEEEEEEEAAAAATTTTTTTGGGGGGGGKKKKKKKKKYYYYYYYYYYYYVVVVVVVPPPPPPPRRRRRRRRRRRAAAAAVVVVVVVLLLLLLLLVVVVVVVDDDDDDDDLLLLLLLLEEEEEEEEEPPPPPPPGGGGTTTTTTTMMMMMMMMDDDDDDDDSSSSSSVVVVVVVRRRRRRRRRRRSSSSSSGGGGPPPPPPPFFFFFFFFFFFGGGGQQQQQQQQQIIIIIIIIFFFFFFFFFFFRRRRRRRRRRRPPPPPPPDDDDDDDDNNNNNNNNFFFFFFFFFFFVVVVVVVFFFFFFFFFFFGGGGQQQQQQQQQSSSSSSGGGGAAAAAGGGGNNNNNNNNNNNNNNNNWWWWWWWWWWWWWWAAAAAKKKKKKKKKGGGGHHHHHHHHHHYYYYYYYYYYYYTTTTTTTEEEEEEEEEGGGGAAAAAEEEEEEEEELLLLLLLLVVVVVVVDDDDDDDDSSSSSSVVVVVVVLLLLLLLLDDDDDDDDVVVVVVVVVVVVVVRRRRRRRRRRRKKKKKKKKKEEEEEEEEEAAAAAEEEEEEEEESSSSSSCCCCCCDDDDDDDDCCCCCCLLLLLLLLQQQQQQQQQGGGGFFFFFFFFFFFQQQQQQQQQLLLLLLLLTTTTTTTHHHHHHHHHHSSSSSSLLLLLLLLGGGGGGGGGGGGTTTTTTTGGGGSSSSSSGGGGMMMMMMMMGGGGTTTTTTTLLLLLLLLLLLLLLLLIIIIIIIISSSSSSKKKKKKKKKIIIIIIIIRRRRRRRRRRREEEEEEEEEEEEEEEEEEYYYYYYYYYYYYPPPPPPPDDDDDDDDRRRRRRRRRRRIIIIIIIIMMMMMMMMNNNNNNNNTTTTTTTFFFFFFFFFFFSSSSSSVVVVVVVVVVVVVVPPPPPPPSSSSSSPPPPPPPKKKKKKKKKVVVVVVVSSSSSSDDDDDDDDTTTTTTTVVVVVVVVVVVVVVEEEEEEEEEPPPPPPPYYYYYYYYYYYYNNNNNNNNAAAAATTTTTTTLLLLLLLLSSSSSSVVVVVVVHHHHHHHHHHQQQQQQQQQLLLLLLLLVVVVVVVEEEEEEEEENNNNNNNNTTTTTTTDDDDDDDDEEEEEEEEETTTTTTTYYYYYYYYYYYYCCCCCCIIIIIIIIDDDDDDDDNNNNNNNNEEEEEEEEEAAAAALLLLLLLLYYYYYYYYYYYYDDDDDDDDIIIIIIIICCCCCCFFFFFFFFFFFRRRRRRRRRRRTTTTTTTLLLLLLLLKKKKKKKKKLLLLLLLLTTTTTTTTTTTTTTPPPPPPPTTTTTTTYYYYYYYYYYYYGGGGDDDDDDDDLLLLLLLLNNNNNNNNHHHHHHHHHHLLLLLLLLVVVVVVVSSSSSSAAAAATTTTTTTMMMMMMMMSSSSSSGGGGVVVVVVVTTTTTTTTTTTTTTCCCCCCLLLLLLLLRRRRRRRRRRRFFFFFFFFFFFPPPPPPPGGGGQQQQQQQQQLLLLLLLLNNNNNNNNAAAAADDDDDDDDLLLLLLLLRRRRRRRRRRRKKKKKKKKKLLLLLLLLAAAAAVVVVVVVNNNNNNNNMMMMMMMMVVVVVVVPPPPPPPFFFFFFFFFFFPPPPPPPRRRRRRRRRRRLLLLLLLLHHHHHHHHHHFFFFFFFFFFFFFFFFFFFFFFMMMMMMMMPPPPPPPGGGGFFFFFFFFFFFAAAAAPPPPPPPLLLLLLLLTTTTTTTSSSSSSRRRRRRRRRRRGGGGSSSSSSQQQQQQQQQQQQQQQQQQYYYYYYYYYYYYRRRRRRRRRRRAAAAALLLLLLLLTTTTTTTVVVVVVVPPPPPPPEEEEEEEEELLLLLLLLTTTTTTTQQQQQQQQQQQQQQQQQQMMMMMMMMFFFFFFFFFFFDDDDDDDDAAAAAKKKKKKKKKNNNNNNNNMMMMMMMMMMMMMMMMAAAAAAAAAACCCCCCDDDDDDDDPPPPPPPRRRRRRRRRRRHHHHHHHHHHGGGGRRRRRRRRRRRYYYYYYYYYYYYLLLLLLLLTTTTTTTVVVVVVVAAAAAAAAAAIIIIIIIIFFFFFFFFFFFRRRRRRRRRRRGGGGRRRRRRRRRRRMMMMMMMMSSSSSSMMMMMMMMKKKKKKKKKEEEEEEEEEVVVVVVVDDDDDDDDEEEEEEEEEQQQQQQQQQMMMMMMMMLLLLLLLLNNNNNNNNVVVVVVVQQQQQQQQQNNNNNNNNKKKKKKKKKNNNNNNNNSSSSSSSSSSSSYYYYYYYYYYYYFFFFFFFFFFFVVVVVVVEEEEEEEEEWWWWWWWWWWWWWWIIIIIIIIPPPPPPPNNNNNNNNNNNNNNNNVVVVVVVKKKKKKKKKTTTTTTTAAAAAVVVVVVVCCCCCCDDDDDDDDIIIIIIIIPPPPPPPPPPPPPPRRRRRRRRRRRGGGGLLLLLLLLKKKKKKKKKMMMMMMMMSSSSSSAAAAATTTTTTTFFFFFFFFFFFIIIIIIIIGGGGNNNNNNNNSSSSSSTTTTTTTAAAAAIIIIIIIIQQQQQQQQQEEEEEEEEELLLLLLLLFFFFFFFFFFFKKKKKKKKKRRRRRRRRRRRIIIIIIIISSSSSSEEEEEEEEEQQQQQQQQQFFFFFFFFFFFTTTTTTTAAAAAMMMMMMMMFFFFFFFFFFFRRRRRRRRRRRRRRRRRRRRRRKKKKKKKKKAAAAAFFFFFFFFFFFLLLLLLLLHHHHHHHHHHWWWWWWWWWWWWWWYYYYYYYYYYYYTTTTTTTGGGGEEEEEEEEEGGGGMMMMMMMMDDDDDDDDEEEEEEEEEMMMMMMMMEEEEEEEEEFFFFFFFFFFFTTTTTTTEEEEEEEEEAAAAAEEEEEEEEESSSSSSNNNNNNNNMMMMMMMMNNNNNNNNDDDDDDDDLLLLLLLLVVVVVVVSSSSSSEEEEEEEEEYYYYYYYYYYYYQQQQQQQQQQQQQQQQQQYYYYYYYYYYYYQQQQQQQQQDDDDDDDDAAAAATTTTTTTAAAAAEEEEEEEEEEEEEEEEEEEEEEEEEEEGGGGEEEEEEEEEFFFFFFFFFFFEEEEEEEEEEEEEEEEEEGGGGEEEEEEEEEEEEEEEEEEEEEEEEEEEEEEEEEEEENNNNNNNNAAAAAA

SEQ ID NO: 182 - protein, 3528 aa, Arabidopsis thaliana
MMMMMMMMRRRRRRRRRRREEEEEEEEEIIIIIIIILLLLLLLLHHHHHHHHHHIIIIIIIIQQQQQQQQQGGGGGGGGQQQQQQQQQCCCCCCGGGGNNNNNNNNQQQQQQQQQIIIIIIIIGGGGSSSSSSKKKKKKKKKFFFFFFFFFFFWWWWWWWWWWWWWWEEEEEEEEEVVVVVVVIIIIIIIICCCCCCDDDDDDDDEEEEEEEEEHHHHHHHHHHGGGGIIIIIIIIDDDDDDDDSSSSSSTTTTTTTGGGGRRRRRRRRRRRYYYYYYYYYYYYSSSSSSGGGGDDDDDDDDTTTTTTTAAAAADDDDDDDDLLLLLLLLQQQQQQQQQLLLLLLLLEEEEEEEEERRRRRRRRRRRIIIIIIIINNNNNNNNVVVVVVVYYYYYYYYYYYYYYYYYYYYYYYYNNNNNNNNEEEEEEEEEAAAAASSSSSSGGGGGGGGRRRRRRRRRRRYYYYYYYYYYYYVVVVVVVPPPPPPPRRRRRRRRRRRAAAAAVVVVVVVLLLLLLLLMMMMMMMMDDDDDDDDLLLLLLLLEEEEEEEEEPPPPPPPGGGGTTTTTTTMMMMMMMMDDDDDDDDSSSSSSIIIIIIIIRRRRRRRRRRRSSSSSSGGGGPPPPPPPFFFFFFFFFFFGGGGQQQQQQQQQIIIIIIIIFFFFFFFFFFFRRRRRRRRRRRPPPPPPPDDDDDDDDNNNNNNNNFFFFFFFFFFFVVVVVVVFFFFFFFFFFFGGGGQQQQQQQQQSSSSSSGGGGAAAAAGGGGNNNNNNNNNNNNNNNNWWWWWWWWWWWWWWAAAAAKKKKKKKKKGGGGHHHHHHHHHHYYYYYYYYYYYYTTTTTTTEEEEEEEEEGGGGAAAAAEEEEEEEEELLLLLLLLIIIIIIIIDDDDDDDDAAAAAVVVVVVVLLLLLLLLDDDDDDDDVVVVVVVVVVVVVVRRRRRRRRRRRKKKKKKKKKEEEEEEEEEAAAAAEEEEEEEEENNNNNNNNCCCCCCDDDDDDDDCCCCCCLLLLLLLLQQQQQQQQQGGGGFFFFFFFFFFFQQQQQQQQQVVVVVVVCCCCCCHHHHHHHHHHSSSSSSLLLLLLLLGGGGGGGGGGGGTTTTTTTGGGGSSSSSSGGGGMMMMMMMMGGGGTTTTTTTLLLLLLLLLLLLLLLLIIIIIIIISSSSSSKKKKKKKKKIIIIIIIIRRRRRRRRRRREEEEEEEEEEEEEEEEEEYYYYYYYYYYYYPPPPPPPDDDDDDDDRRRRRRRRRRRMMMMMMMMMMMMMMMMLLLLLLLLTTTTTTTFFFFFFFFFFFSSSSSSVVVVVVVFFFFFFFFFFFPPPPPPPSSSSSSPPPPPPPKKKKKKKKKVVVVVVVSSSSSSDDDDDDDDTTTTTTTVVVVVVVVVVVVVVEEEEEEEEEPPPPPPPYYYYYYYYYYYYNNNNNNNNAAAAATTTTTTTLLLLLLLLSSSSSSVVVVVVVHHHHHHHHHHQQQQQQQQQLLLLLLLLVVVVVVVEEEEEEEEENNNNNNNNAAAAADDDDDDDDEEEEEEEEECCCCCCMMMMMMMMVVVVVVVLLLLLLLLDDDDDDDDNNNNNNNNEEEEEEEEEAAAAALLLLLLLLYYYYYYYYYYYYDDDDDDDDIIIIIIIICCCCCCFFFFFFFFFFFRRRRRRRRRRRTTTTTTTLLLLLLLLKKKKKKKKKLLLLLLLLSSSSSSTTTTTTTPPPPPPPSSSSSSFFFFFFFFFFFGGGGDDDDDDDDLLLLLLLLNNNNNNNNHHHHHHHHHHLLLLLLLLIIIIIIIISSSSSSAAAAATTTTTTTMMMMMMMMSSSSSSGGGGVVVVVVVTTTTTTTCCCCCCSSSSSSLLLLLLLLRRRRRRRRRRRFFFFFFFFFFFPPPPPPPGGGGQQQQQQQQQLLLLLLLLNNNNNNNNSSSSSSDDDDDDDDLLLLLLLLRRRRRRRRRRRKKKKKKKKKLLLLLLLLAAAAAVVVVVVVNNNNNNNNLLLLLLLLIIIIIIIIPPPPPPPFFFFFFFFFFFPPPPPPPRRRRRRRRRRRLLLLLLLLHHHHHHHHHHFFFFFFFFFFFFFFFFFFFFFFMMMMMMMMVVVVVVVGGGGFFFFFFFFFFFAAAAAPPPPPPPLLLLLLLLTTTTTTTSSSSSSRRRRRRRRRRRGGGGSSSSSSQQQQQQQQQQQQQQQQQQYYYYYYYYYYYYIIIIIIIISSSSSSLLLLLLLLTTTTTTTVVVVVVVPPPPPPPEEEEEEEEELLLLLLLLTTTTTTTQQQQQQQQQQQQQQQQQQMMMMMMMMWWWWWWWWWWWWWWDDDDDDDDSSSSSSKKKKKKKKKNNNNNNNNMMMMMMMMMMMMMMMMCCCCCCAAAAAAAAAADDDDDDDDPPPPPPPRRRRRRRRRRRHHHHHHHHHHGGGGRRRRRRRRRRRYYYYYYYYYYYYLLLLLLLLTTTTTTTAAAAASSSSSSAAAAAIIIIIIIIFFFFFFFFFFFRRRRRRRRRRRGGGGQQQQQQQQQMMMMMMMMSSSSSSTTTTTTTKKKKKKKKKEEEEEEEEEVVVVVVVDDDDDDDDEEEEEEEEEQQQQQQQQQIIIIIIIILLLLLLLLNNNNNNNNIIIIIIIIQQQQQQQQQNNNNNNNNKKKKKKKKKNNNNNNNNSSSSSSSSSSSSYYYYYYYYYYYYFFFFFFFFFFFVVVVVVVEEEEEEEEEWWWWWWWWWWWWWWIIIIIIIIPPPPPPPNNNNNNNNNNNNNNNNVVVVVVVKKKKKKKKKSSSSSSSSSSSSVVVVVVVCCCCCCDDDDDDDDIIIIIIIIPPPPPPPPPPPPPPKKKKKKKKKGGGGLLLLLLLLKKKKKKKKKMMMMMMMMAAAAAAAAAATTTTTTTFFFFFFFFFFFVVVVVVVGGGGNNNNNNNNSSSSSSTTTTTTTSSSSSSIIIIIIIIQQQQQQQQQEEEEEEEEEMMMMMMMMFFFFFFFFFFFRRRRRRRRRRRRRRRRRRRRRRVVVVVVVSSSSSSEEEEEEEEEQQQQQQQQQFFFFFFFFFFFTTTTTTTAAAAAMMMMMMMMFFFFFFFFFFFRRRRRRRRRRRRRRRRRRRRRRKKKKKKKKKAAAAAFFFFFFFFFFFLLLLLLLLHHHHHHHHHHWWWWWWWWWWWWWWYYYYYYYYYYYYTTTTTTTGGGGEEEEEEEEEGGGGMMMMMMMMDDDDDDDDEEEEEEEEEMMMMMMMMEEEEEEEEEFFFFFFFFFFFTTTTTTTEEEEEEEEEAAAAAEEEEEEEEESSSSSSNNNNNNNNMMMMMMMMNNNNNNNNDDDDDDDDLLLLLLLLVVVVVVVAAAAAEEEEEEEEEYYYYYYYYYYYYQQQQQQQQQQQQQQQQQQYYYYYYYYYYYYQQQQQQQQQDDDDDDDDAAAAATTTTTTTAAAAADDDDDDDDEEEEEEEEEEEEEEEEEEGGGGEEEEEEEEEYYYYYYYYYYYYDDDDDDDDVVVVVVVEEEEEEEEEEEEEEEEEEEEEEEEEEEEEEEEEEEEEEEEEEEEEGGGGDDDDDDDDYYYYYYYYYYYYEEEEEEEEETTTTTTTT

SEQ ID NO: 183 - protein, 3505 aa, Gallus gallus
MMMMMMMMRRRRRRRRRRREEEEEEEEEIIIIIIIIVVVVVVVHHHHHHHHHHIIIIIIIIQQQQQQQQQAAAAAGGGGQQQQQQQQQCCCCCCGGGGNNNNNNNNQQQQQQQQQIIIIIIIIGGGGTTTTTTTKKKKKKKKKFFFFFFFFFFFWWWWWWWWWWWWWWEEEEEEEEEVVVVVVVIIIIIIIISSSSSSDDDDDDDDEEEEEEEEEHHHHHHHHHHGGGGIIIIIIIIDDDDDDDDPPPPPPPAAAAAGGGGGGGGYYYYYYYYYYYYVVVVVVVGGGGDDDDDDDDSSSSSSAAAAALLLLLLLLQQQQQQQQQLLLLLLLLEEEEEEEEERRRRRRRRRRRIIIIIIIINNNNNNNNVVVVVVVYYYYYYYYYYYYYYYYYYYYYYYYNNNNNNNNEEEEEEEEESSSSSSSSSSSSSSSSSSQQQQQQQQQKKKKKKKKKYYYYYYYYYYYYVVVVVVVPPPPPPPRRRRRRRRRRRAAAAAVVVVVVVLLLLLLLLVVVVVVVDDDDDDDDLLLLLLLLEEEEEEEEEPPPPPPPGGGGTTTTTTTMMMMMMMMDDDDDDDDSSSSSSVVVVVVVRRRRRRRRRRRSSSSSSGGGGPPPPPPPFFFFFFFFFFFGGGGQQQQQQQQQLLLLLLLLFFFFFFFFFFFRRRRRRRRRRRPPPPPPPDDDDDDDDNNNNNNNNFFFFFFFFFFFIIIIIIIIFFFFFFFFFFFGGGGQQQQQQQQQTTTTTTTGGGGAAAAAGGGGNNNNNNNNNNNNNNNNWWWWWWWWWWWWWWAAAAAKKKKKKKKKGGGGHHHHHHHHHHYYYYYYYYYYYYTTTTTTTEEEEEEEEEGGGGAAAAAEEEEEEEEELLLLLLLLVVVVVVVDDDDDDDDSSSSSSVVVVVVVLLLLLLLLDDDDDDDDVVVVVVVVVVVVVVRRRRRRRRRRRKKKKKKKKKEEEEEEEEECCCCCCEEEEEEEEEHHHHHHHHHHCCCCCCDDDDDDDDCCCCCCLLLLLLLLQQQQQQQQQGGGGFFFFFFFFFFFQQQQQQQQQLLLLLLLLTTTTTTTHHHHHHHHHHSSSSSSLLLLLLLLGGGGGGGGGGGGTTTTTTTGGGGSSSSSSGGGGMMMMMMMMGGGGTTTTTTTLLLLLLLLLLLLLLLLIIIIIIIISSSSSSKKKKKKKKKIIIIIIIIRRRRRRRRRRREEEEEEEEEEEEEEEEEEYYYYYYYYYYYYPPPPPPPDDDDDDDDRRRRRRRRRRRIIIIIIIIMMMMMMMMNNNNNNNNTTTTTTTFFFFFFFFFFFSSSSSSVVVVVVVMMMMMMMMPPPPPPPSSSSSSPPPPPPPKKKKKKKKKVVVVVVVSSSSSSDDDDDDDDTTTTTTTVVVVVVVVVVVVVVEEEEEEEEEPPPPPPPYYYYYYYYYYYYNNNNNNNNAAAAATTTTTTTLLLLLLLLSSSSSSVVVVVVVHHHHHHHHHHQQQQQQQQQLLLLLLLLVVVVVVVEEEEEEEEENNNNNNNNTTTTTTTDDDDDDDDEEEEEEEEETTTTTTTYYYYYYYYYYYYCCCCCCIIIIIIIIDDDDDDDDNNNNNNNNEEEEEEEEEAAAAALLLLLLLLYYYYYYYYYYYYDDDDDDDDIIIIIIIICCCCCCFFFFFFFFFFFRRRRRRRRRRRTTTTTTTLLLLLLLLKKKKKKKKKLLLLLLLLTTTTTTTTTTTTTTPPPPPPPTTTTTTTYYYYYYYYYYYYGGGGDDDDDDDDLLLLLLLLNNNNNNNNHHHHHHHHHHLLLLLLLLVVVVVVVSSSSSSAAAAATTTTTTTMMMMMMMMSSSSSSGGGGVVVVVVVTTTTTTTTTTTTTTSSSSSSLLLLLLLLRRRRRRRRRRRFFFFFFFFFFFPPPPPPPGGGGQQQQQQQQQLLLLLLLLNNNNNNNNAAAAADDDDDDDDLLLLLLLLRRRRRRRRRRRKKKKKKKKKLLLLLLLLAAAAAVVVVVVVNNNNNNNNMMMMMMMMVVVVVVVPPPPPPPFFFFFFFFFFFPPPPPPPRRRRRRRRRRRLLLLLLLLHHHHHHHHHHFFFFFFFFFFFFFFFFFFFFFFMMMMMMMMPPPPPPPGGGGFFFFFFFFFFFAAAAAPPPPPPPLLLLLLLLTTTTTTTAAAAARRRRRRRRRRRGGGGSSSSSSQQQQQQQQQQQQQQQQQQYYYYYYYYYYYYRRRRRRRRRRRAAAAALLLLLLLLTTTTTTTVVVVVVVPPPPPPPEEEEEEEEELLLLLLLLTTTTTTTQQQQQQQQQQQQQQQQQQMMMMMMMMFFFFFFFFFFFDDDDDDDDAAAAAKKKKKKKKKNNNNNNNNMMMMMMMMMMMMMMMMAAAAAAAAAACCCCCCDDDDDDDDPPPPPPPRRRRRRRRRRRHHHHHHHHHHGGGGRRRRRRRRRRRYYYYYYYYYYYYLLLLLLLLTTTTTTTVVVVVVVAAAAATTTTTTTVVVVVVVFFFFFFFFFFFRRRRRRRRRRRGGGGPPPPPPPMMMMMMMMSSSSSSMMMMMMMMKKKKKKKKKEEEEEEEEEVVVVVVVDDDDDDDDEEEEEEEEEQQQQQQQQQMMMMMMMMLLLLLLLLAAAAAIIIIIIIIQQQQQQQQQNNNNNNNNKKKKKKKKKNNNNNNNNSSSSSSSSSSSSYYYYYYYYYYYYFFFFFFFFFFFVVVVVVVEEEEEEEEEWWWWWWWWWWWWWWIIIIIIIIPPPPPPPNNNNNNNNNNNNNNNNVVVVVVVKKKKKKKKKVVVVVVVAAAAAVVVVVVVCCCCCCDDDDDDDDIIIIIIIIPPPPPPPPPPPPPPRRRRRRRRRRRGGGGLLLLLLLLKKKKKKKKKMMMMMMMMAAAAASSSSSSTTTTTTTFFFFFFFFFFFIIIIIIIIGGGGNNNNNNNNSSSSSSTTTTTTTAAAAAIIIIIIIIQQQQQQQQQEEEEEEEEELLLLLLLLFFFFFFFFFFFKKKKKKKKKRRRRRRRRRRRIIIIIIIISSSSSSEEEEEEEEEQQQQQQQQQFFFFFFFFFFFSSSSSSAAAAAMMMMMMMMFFFFFFFFFFFRRRRRRRRRRRRRRRRRRRRRRKKKKKKKKKAAAAAFFFFFFFFFFFLLLLLLLLHHHHHHHHHHWWWWWWWWWWWWWWFFFFFFFFFFFTTTTTTTGGGGEEEEEEEEEGGGGMMMMMMMMDDDDDDDDEEEEEEEEEMMMMMMMMEEEEEEEEEFFFFFFFFFFFTTTTTTTEEEEEEEEEAAAAAEEEEEEEEESSSSSSNNNNNNNNMMMMMMMMNNNNNNNNDDDDDDDDLLLLLLLLVVVVVVVSSSSSSEEEEEEEEEYYYYYYYYYYYYQQQQQQQQQQQQQQQQQQYYYYYYYYYYYYQQQQQQQQQEEEEEEEEEAAAAATTTTTTTAAAAANNNNNNNNDDDDDDDDGGGGEEEEEEEEEEEEEEEEEEAAAAAFFFFFFFFFFFEEEEEEEEEDDDDDDDDDDDDDDDDEEEEEEEEEEEEEEEEEEEEEEEEEEEIIIIIIIINNNNNNNNEEEEEEEEEE

SEQ ID NO: 184 - protein, 3502 aa, Ectocarpus variabilis
MMMMMMMMRRRRRRRRRRREEEEEEEEEIIIIIIIIVVVVVVVHHHHHHHHHHVVVVVVVQQQQQQQQQAAAAAGGGGQQQQQQQQQCCCCCCGGGGNNNNNNNNQQQQQQQQQIIIIIIIIGGGGSSSSSSKKKKKKKKKFFFFFFFFFFFWWWWWWWWWWWWWWEEEEEEEEEVVVVVVVIIIIIIIISSSSSSDDDDDDDDEEEEEEEEEHHHHHHHHHHGGGGIIIIIIIIDDDDDDDDPPPPPPPTTTTTTTGGGGSSSSSSYYYYYYYYYYYYHHHHHHHHHHGGGGDDDDDDDDSSSSSSDDDDDDDDLLLLLLLLQQQQQQQQQLLLLLLLLEEEEEEEEERRRRRRRRRRRIIIIIIIINNNNNNNNCCCCCCYYYYYYYYYYYYFFFFFFFFFFFNNNNNNNNEEEEEEEEEAAAAATTTTTTTGGGGGGGGRRRRRRRRRRRYYYYYYYYYYYYVVVVVVVPPPPPPPRRRRRRRRRRRAAAAAIIIIIIIILLLLLLLLMMMMMMMMDDDDDDDDLLLLLLLLEEEEEEEEEPPPPPPPGGGGTTTTTTTMMMMMMMMDDDDDDDDSSSSSSVVVVVVVRRRRRRRRRRRAAAAAGGGGPPPPPPPFFFFFFFFFFFGGGGQQQQQQQQQLLLLLLLLFFFFFFFFFFFRRRRRRRRRRRPPPPPPPDDDDDDDDNNNNNNNNFFFFFFFFFFFVVVVVVVFFFFFFFFFFFGGGGQQQQQQQQQTTTTTTTGGGGAAAAAGGGGNNNNNNNNNNNNNNNNWWWWWWWWWWWWWWAAAAAKKKKKKKKKGGGGHHHHHHHHHHYYYYYYYYYYYYTTTTTTTEEEEEEEEEGGGGAAAAAEEEEEEEEELLLLLLLLIIIIIIIIDDDDDDDDSSSSSSVVVVVVVLLLLLLLLDDDDDDDDVVVVVVVVVVVVVVRRRRRRRRRRRKKKKKKKKKEEEEEEEEEAAAAAEEEEEEEEESSSSSSCCCCCCDDDDDDDDAAAAALLLLLLLLQQQQQQQQQGGGGFFFFFFFFFFFQQQQQQQQQLLLLLLLLTTTTTTTHHHHHHHHHHSSSSSSMMMMMMMMGGGGGGGGGGGGTTTTTTTGGGGAAAAAGGGGMMMMMMMMGGGGTTTTTTTLLLLLLLLLLLLLLLLIIIIIIIISSSSSSKKKKKKKKKVVVVVVVRRRRRRRRRRREEEEEEEEEEEEEEEEEEYYYYYYYYYYYYPPPPPPPDDDDDDDDRRRRRRRRRRRVVVVVVVMMMMMMMMSSSSSSTTTTTTTYYYYYYYYYYYYSSSSSSVVVVVVVIIIIIIIIPPPPPPPSSSSSSPPPPPPPKKKKKKKKKVVVVVVVSSSSSSDDDDDDDDTTTTTTTVVVVVVVVVVVVVVEEEEEEEEEPPPPPPPYYYYYYYYYYYYNNNNNNNNAAAAATTTTTTTLLLLLLLLSSSSSSVVVVVVVHHHHHHHHHHQQQQQQQQQLLLLLLLLVVVVVVVEEEEEEEEENNNNNNNNAAAAADDDDDDDDQQQQQQQQQCCCCCCFFFFFFFFFFFTTTTTTTLLLLLLLLDDDDDDDDNNNNNNNNEEEEEEEEEAAAAALLLLLLLLYYYYYYYYYYYYDDDDDDDDIIIIIIIICCCCCCFFFFFFFFFFFRRRRRRRRRRRTTTTTTTLLLLLLLLKKKKKKKKKLLLLLLLLTTTTTTTTTTTTTTPPPPPPPTTTTTTTYYYYYYYYYYYYGGGGDDDDDDDDLLLLLLLLNNNNNNNNHHHHHHHHHHLLLLLLLLVVVVVVVSSSSSSAAAAAAAAAAIIIIIIIICCCCCCGGGGTTTTTTTTTTTTTTCCCCCCSSSSSSLLLLLLLLRRRRRRRRRRRFFFFFFFFFFFPPPPPPPGGGGQQQQQQQQQLLLLLLLLNNNNNNNNCCCCCCDDDDDDDDLLLLLLLLRRRRRRRRRRRKKKKKKKKKLLLLLLLLAAAAAVVVVVVVNNNNNNNNMMMMMMMMVVVVVVVPPPPPPPFFFFFFFFFFFPPPPPPPRRRRRRRRRRRLLLLLLLLHHHHHHHHHHFFFFFFFFFFFFFFFFFFFFFFMMMMMMMMIIIIIIIIGGGGFFFFFFFFFFFAAAAAPPPPPPPLLLLLLLLTTTTTTTSSSSSSRRRRRRRRRRRGGGGSSSSSSQQQQQQQQQQQQQQQQQQYYYYYYYYYYYYRRRRRRRRRRRAAAAALLLLLLLLTTTTTTTVVVVVVVPPPPPPPEEEEEEEEELLLLLLLLTTTTTTTQQQQQQQQQQQQQQQQQQCCCCCCFFFFFFFFFFFDDDDDDDDSSSSSSKKKKKKKKKNNNNNNNNMMMMMMMMMMMMMMMMCCCCCCAAAAAAAAAADDDDDDDDPPPPPPPRRRRRRRRRRRHHHHHHHHHHGGGGRRRRRRRRRRRYYYYYYYYYYYYLLLLLLLLTTTTTTTCCCCCCAAAAAVVVVVVVMMMMMMMMFFFFFFFFFFFRRRRRRRRRRRGGGGRRRRRRRRRRRMMMMMMMMSSSSSSTTTTTTTKKKKKKKKKEEEEEEEEEVVVVVVVDDDDDDDDEEEEEEEEEQQQQQQQQQMMMMMMMMLLLLLLLLNNNNNNNNVVVVVVVVVVVVVVNNNNNNNNKKKKKKKKKNNNNNNNNSSSSSSSSSSSSYYYYYYYYYYYYFFFFFFFFFFFVVVVVVVEEEEEEEEEWWWWWWWWWWWWWWIIIIIIIIPPPPPPPNNNNNNNNNNNNNNNNVVVVVVVKKKKKKKKKAAAAASSSSSSIIIIIIIICCCCCCDDDDDDDDIIIIIIIIPPPPPPPPPPPPPPKKKKKKKKKGGGGLLLLLLLLKKKKKKKKKMMMMMMMMSSSSSSTTTTTTTTTTTTTTFFFFFFFFFFFVVVVVVVGGGGNNNNNNNNTTTTTTTTTTTTTTAAAAAIIIIIIIIQQQQQQQQQEEEEEEEEEVVVVVVVWWWWWWWWWWWWWWKKKKKKKKKRRRRRRRRRRRVVVVVVVAAAAAEEEEEEEEEQQQQQQQQQFFFFFFFFFFFTTTTTTTSSSSSSMMMMMMMMFFFFFFFFFFFRRRRRRRRRRRRRRRRRRRRRRKKKKKKKKKAAAAAFFFFFFFFFFFLLLLLLLLHHHHHHHHHHWWWWWWWWWWWWWWYYYYYYYYYYYYTTTTTTTGGGGEEEEEEEEEGGGGMMMMMMMMDDDDDDDDEEEEEEEEEMMMMMMMMEEEEEEEEEFFFFFFFFFFFTTTTTTTEEEEEEEEEAAAAAEEEEEEEEESSSSSSNNNNNNNNMMMMMMMMNNNNNNNNDDDDDDDDLLLLLLLLVVVVVVVSSSSSSEEEEEEEEEYYYYYYYYYYYYQQQQQQQQQQQQQQQQQQYYYYYYYYYYYYQQQQQQQQQDDDDDDDDAAAAATTTTTTTAAAAAEEEEEEEEEEEEEEEEEEEEEEEEEEEGGGGEEEEEEEEEFFFFFFFFFFFDDDDDDDDEEEEEEEEEDDDDDDDDEEEEEEEEEEEEEEEEEELLLLLLLLDDDDDDDDDDDDDDDDAAAAAMMMMMMMMGGGGG

SEQ ID NO: 185 - protein, 3481 aa, Homo sapiens
MMMMMMMMRRRRRRRRRRREEEEEEEEEIIIIIIIIVVVVVVVHHHHHHHHHHLLLLLLLLQQQQQQQQQAAAAAGGGGQQQQQQQQQCCCCCCGGGGNNNNNNNNQQQQQQQQQIIIIIIIIGGGGAAAAAKKKKKKKKKFFFFFFFFFFFWWWWWWWWWWWWWWEEEEEEEEEVVVVVVVIIIIIIIISSSSSSDDDDDDDDEEEEEEEEEHHHHHHHHHHGGGGIIIIIIIIDDDDDDDDPPPPPPPTTTTTTTGGGGTTTTTTTYYYYYYYYYYYYHHHHHHHHHHGGGGDDDDDDDDSSSSSSDDDDDDDDLLLLLLLLQQQQQQQQQLLLLLLLLEEEEEEEEERRRRRRRRRRRIIIIIIIINNNNNNNNVVVVVVVYYYYYYYYYYYYYYYYYYYYYYYYNNNNNNNNEEEEEEEEEAAAAATTTTTTTGGGGGGGGNNNNNNNNYYYYYYYYYYYYVVVVVVVPPPPPPPRRRRRRRRRRRAAAAAVVVVVVVLLLLLLLLVVVVVVVDDDDDDDDLLLLLLLLEEEEEEEEEPPPPPPPGGGGTTTTTTTMMMMMMMMDDDDDDDDSSSSSSVVVVVVVRRRRRRRRRRRSSSSSSGGGGPPPPPPPFFFFFFFFFFFGGGGQQQQQQQQQIIIIIIIIFFFFFFFFFFFRRRRRRRRRRRPPPPPPPDDDDDDDDNNNNNNNNFFFFFFFFFFFVVVVVVVFFFFFFFFFFFGGGGQQQQQQQQQSSSSSSGGGGAAAAAGGGGNNNNNNNNNNNNNNNNWWWWWWWWWWWWWWAAAAAKKKKKKKKKGGGGHHHHHHHHHHYYYYYYYYYYYYTTTTTTTEEEEEEEEEGGGGAAAAAEEEEEEEEELLLLLLLLVVVVVVVDDDDDDDDAAAAAVVVVVVVLLLLLLLLDDDDDDDDVVVVVVVVVVVVVVRRRRRRRRRRRKKKKKKKKKEEEEEEEEEAAAAAEEEEEEEEESSSSSSCCCCCCDDDDDDDDCCCCCCLLLLLLLLQQQQQQQQQGGGGFFFFFFFFFFFQQQQQQQQQLLLLLLLLTTTTTTTHHHHHHHHHHSSSSSSLLLLLLLLGGGGGGGGGGGGTTTTTTTGGGGSSSSSSGGGGMMMMMMMMGGGGTTTTTTTLLLLLLLLLLLLLLLLIIIIIIIISSSSSSKKKKKKKKKMMMMMMMMRRRRRRRRRRREEEEEEEEEEEEEEEEEEFFFFFFFFFFFPPPPPPPDDDDDDDDRRRRRRRRRRRIIIIIIIIMMMMMMMMNNNNNNNNTTTTTTTFFFFFFFFFFFSSSSSSVVVVVVVVVVVVVVPPPPPPPSSSSSSPPPPPPPKKKKKKKKKVVVVVVVSSSSSSDDDDDDDDTTTTTTTVVVVVVVVVVVVVVEEEEEEEEEPPPPPPPYYYYYYYYYYYYNNNNNNNNAAAAATTTTTTTLLLLLLLLSSSSSSVVVVVVVHHHHHHHHHHQQQQQQQQQLLLLLLLLVVVVVVVEEEEEEEEENNNNNNNNTTTTTTTDDDDDDDDEEEEEEEEETTTTTTTYYYYYYYYYYYYCCCCCCIIIIIIIIDDDDDDDDNNNNNNNNEEEEEEEEEAAAAALLLLLLLLYYYYYYYYYYYYDDDDDDDDIIIIIIIICCCCCCFFFFFFFFFFFRRRRRRRRRRRTTTTTTTLLLLLLLLKKKKKKKKKLLLLLLLLTTTTTTTTTTTTTTPPPPPPPTTTTTTTYYYYYYYYYYYYGGGGDDDDDDDDLLLLLLLLNNNNNNNNHHHHHHHHHHLLLLLLLLVVVVVVVSSSSSSAAAAATTTTTTTMMMMMMMMSSSSSSGGGGVVVVVVVTTTTTTTTTTTTTTCCCCCCLLLLLLLLRRRRRRRRRRRFFFFFFFFFFFPPPPPPPGGGGQQQQQQQQQLLLLLLLLNNNNNNNNAAAAADDDDDDDDLLLLLLLLRRRRRRRRRRRKKKKKKKKKLLLLLLLLAAAAAVVVVVVVNNNNNNNNMMMMMMMMVVVVVVVPPPPPPPFFFFFFFFFFFPPPPPPPRRRRRRRRRRRLLLLLLLLHHHHHHHHHHFFFFFFFFFFFFFFFFFFFFFFMMMMMMMMPPPPPPPAAAAAFFFFFFFFFFFAAAAAPPPPPPPLLLLLLLLTTTTTTTSSSSSSRRRRRRRRRRRGGGGSSSSSSQQQQQQQQQQQQQQQQQQYYYYYYYYYYYYRRRRRRRRRRRGGGGLLLLLLLLTTTTTTTVVVVVVVPPPPPPPEEEEEEEEELLLLLLLLTTTTTTTQQQQQQQQQQQQQQQQQQMMMMMMMMFFFFFFFFFFFDDDDDDDDAAAAAKKKKKKKKKNNNNNNNNMMMMMMMMMMMMMMMMAAAAAAAAAACCCCCCDDDDDDDDPPPPPPPRRRRRRRRRRRHHHHHHHHHHGGGGRRRRRRRRRRRYYYYYYYYYYYYLLLLLLLLTTTTTTTVVVVVVVAAAAAAAAAAVVVVVVVFFFFFFFFFFFRRRRRRRRRRRGGGGRRRRRRRRRRRMMMMMMMMSSSSSSMMMMMMMMKKKKKKKKKEEEEEEEEEVVVVVVVDDDDDDDDEEEEEEEEEQQQQQQQQQMMMMMMMMLLLLLLLLSSSSSSVVVVVVVQQQQQQQQQSSSSSSKKKKKKKKKNNNNNNNNSSSSSSSSSSSSYYYYYYYYYYYYFFFFFFFFFFFVVVVVVVEEEEEEEEEWWWWWWWWWWWWWWIIIIIIIIPPPPPPPNNNNNNNNNNNNNNNNVVVVVVVKKKKKKKKKTTTTTTTAAAAAVVVVVVVCCCCCCDDDDDDDDIIIIIIIIPPPPPPPPPPPPPPRRRRRRRRRRRGGGGLLLLLLLLKKKKKKKKKMMMMMMMMAAAAAVVVVVVVTTTTTTTFFFFFFFFFFFIIIIIIIIGGGGNNNNNNNNSSSSSSTTTTTTTAAAAAIIIIIIIIQQQQQQQQQEEEEEEEEELLLLLLLLFFFFFFFFFFFKKKKKKKKKRRRRRRRRRRRIIIIIIIISSSSSSEEEEEEEEEQQQQQQQQQFFFFFFFFFFFTTTTTTTAAAAAMMMMMMMMFFFFFFFFFFFRRRRRRRRRRRRRRRRRRRRRRKKKKKKKKKAAAAAFFFFFFFFFFFLLLLLLLLHHHHHHHHHHWWWWWWWWWWWWWWYYYYYYYYYYYYTTTTTTTGGGGEEEEEEEEEGGGGMMMMMMMMDDDDDDDDEEEEEEEEEMMMMMMMMEEEEEEEEEFFFFFFFFFFFTTTTTTTEEEEEEEEEAAAAAEEEEEEEEESSSSSSNNNNNNNNMMMMMMMMNNNNNNNNDDDDDDDDLLLLLLLLVVVVVVVSSSSSSEEEEEEEEEYYYYYYYYYYYYQQQQQQQQQQQQQQQQQQYYYYYYYYYYYYQQQQQQQQQDDDDDDDDAAAAATTTTTTTAAAAAEEEEEEEEEQQQQQQQQQGGGGEEEEEEEEEFFFFFFFFFFFEEEEEEEEEEEEEEEEEEEEEEEEEEEAAAAAEEEEEEEEEEEEEEEEEEEEEEEEEEEVVVVVVVAAAAAA

SEQ ID NO: 186 - protein, 3502 aa, Zea mays
MMMMMMMMRRRRRRRRRRREEEEEEEEEIIIIIIIILLLLLLLLHHHHHHHHHHIIIIIIIIQQQQQQQQQGGGGGGGGQQQQQQQQQCCCCCCGGGGNNNNNNNNQQQQQQQQQIIIIIIIIGGGGSSSSSSKKKKKKKKKFFFFFFFFFFFWWWWWWWWWWWWWWEEEEEEEEEVVVVVVVVVVVVVVCCCCCCDDDDDDDDEEEEEEEEEHHHHHHHHHHGGGGIIIIIIIIDDDDDDDDPPPPPPPTTTTTTTGGGGRRRRRRRRRRRYYYYYYYYYYYYVVVVVVVGGGGTTTTTTTSSSSSSDDDDDDDDLLLLLLLLQQQQQQQQQLLLLLLLLEEEEEEEEERRRRRRRRRRRVVVVVVVNNNNNNNNVVVVVVVYYYYYYYYYYYYYYYYYYYYYYYYNNNNNNNNEEEEEEEEEAAAAASSSSSSCCCCCCGGGGRRRRRRRRRRRFFFFFFFFFFFVVVVVVVPPPPPPPRRRRRRRRRRRAAAAAVVVVVVVLLLLLLLLMMMMMMMMDDDDDDDDLLLLLLLLEEEEEEEEEPPPPPPPGGGGTTTTTTTMMMMMMMMDDDDDDDDSSSSSSVVVVVVVRRRRRRRRRRRTTTTTTTGGGGPPPPPPPYYYYYYYYYYYYGGGGQQQQQQQQQIIIIIIIIFFFFFFFFFFFRRRRRRRRRRRPPPPPPPDDDDDDDDNNNNNNNNFFFFFFFFFFFVVVVVVVFFFFFFFFFFFGGGGQQQQQQQQQSSSSSSGGGGAAAAAGGGGNNNNNNNNNNNNNNNNWWWWWWWWWWWWWWAAAAAKKKKKKKKKGGGGHHHHHHHHHHYYYYYYYYYYYYTTTTTTTEEEEEEEEEGGGGAAAAAEEEEEEEEELLLLLLLLIIIIIIIIDDDDDDDDSSSSSSVVVVVVVLLLLLLLLDDDDDDDDVVVVVVVVVVVVVVRRRRRRRRRRRKKKKKKKKKEEEEEEEEEAAAAAEEEEEEEEENNNNNNNNCCCCCCDDDDDDDDCCCCCCLLLLLLLLQQQQQQQQQGGGGFFFFFFFFFFFQQQQQQQQQVVVVVVVCCCCCCHHHHHHHHHHSSSSSSLLLLLLLLGGGGGGGGGGGGTTTTTTTGGGGSSSSSSGGGGMMMMMMMMGGGGTTTTTTTLLLLLLLLLLLLLLLLIIIIIIIISSSSSSKKKKKKKKKIIIIIIIIRRRRRRRRRRREEEEEEEEEEEEEEEEEEYYYYYYYYYYYYPPPPPPPDDDDDDDDRRRRRRRRRRRMMMMMMMMMMMMMMMMLLLLLLLLTTTTTTTFFFFFFFFFFFSSSSSSVVVVVVVFFFFFFFFFFFPPPPPPPSSSSSSPPPPPPPKKKKKKKKKVVVVVVVSSSSSSDDDDDDDDTTTTTTTVVVVVVVVVVVVVVEEEEEEEEEPPPPPPPYYYYYYYYYYYYNNNNNNNNAAAAATTTTTTTLLLLLLLLSSSSSSVVVVVVVHHHHHHHHHHQQQQQQQQQLLLLLLLLVVVVVVVEEEEEEEEENNNNNNNNAAAAADDDDDDDDEEEEEEEEECCCCCCMMMMMMMMVVVVVVVLLLLLLLLDDDDDDDDNNNNNNNNEEEEEEEEEAAAAALLLLLLLLYYYYYYYYYYYYDDDDDDDDIIIIIIIICCCCCCFFFFFFFFFFFRRRRRRRRRRRTTTTTTTLLLLLLLLKKKKKKKKKLLLLLLLLTTTTTTTTTTTTTTPPPPPPPSSSSSSFFFFFFFFFFFGGGGDDDDDDDDLLLLLLLLNNNNNNNNHHHHHHHHHHLLLLLLLLIIIIIIIISSSSSSAAAAATTTTTTTMMMMMMMMSSSSSSGGGGVVVVVVVTTTTTTTCCCCCCCCCCCCLLLLLLLLRRRRRRRRRRRFFFFFFFFFFFPPPPPPPGGGGQQQQQQQQQLLLLLLLLNNNNNNNNSSSSSSDDDDDDDDLLLLLLLLRRRRRRRRRRRKKKKKKKKKLLLLLLLLAAAAAVVVVVVVNNNNNNNNLLLLLLLLIIIIIIIIPPPPPPPFFFFFFFFFFFPPPPPPPRRRRRRRRRRRLLLLLLLLHHHHHHHHHHFFFFFFFFFFFFFFFFFFFFFFMMMMMMMMVVVVVVVGGGGFFFFFFFFFFFAAAAAPPPPPPPLLLLLLLLTTTTTTTSSSSSSRRRRRRRRRRRGGGGSSSSSSQQQQQQQQQQQQQQQQQQYYYYYYYYYYYYRRRRRRRRRRRAAAAALLLLLLLLTTTTTTTVVVVVVVPPPPPPPEEEEEEEEELLLLLLLLTTTTTTTQQQQQQQQQQQQQQQQQQMMMMMMMMWWWWWWWWWWWWWWDDDDDDDDAAAAAKKKKKKKKKNNNNNNNNMMMMMMMMMMMMMMMMCCCCCCAAAAAAAAAADDDDDDDDPPPPPPPRRRRRRRRRRRHHHHHHHHHHGGGGRRRRRRRRRRRYYYYYYYYYYYYLLLLLLLLTTTTTTTAAAAASSSSSSAAAAAMMMMMMMMFFFFFFFFFFFRRRRRRRRRRRGGGGKKKKKKKKKMMMMMMMMSSSSSSTTTTTTTKKKKKKKKKEEEEEEEEEVVVVVVVDDDDDDDDEEEEEEEEEQQQQQQQQQMMMMMMMMIIIIIIIINNNNNNNNVVVVVVVQQQQQQQQQNNNNNNNNKKKKKKKKKNNNNNNNNSSSSSSSSSSSSYYYYYYYYYYYYFFFFFFFFFFFVVVVVVVEEEEEEEEEWWWWWWWWWWWWWWIIIIIIIIPPPPPPPNNNNNNNNNNNNNNNNVVVVVVVKKKKKKKKKSSSSSSSSSSSSVVVVVVVCCCCCCDDDDDDDDIIIIIIIIPPPPPPPPPPPPPPRRRRRRRRRRRGGGGLLLLLLLLSSSSSSMMMMMMMMAAAAASSSSSSTTTTTTTFFFFFFFFFFFIIIIIIIIGGGGNNNNNNNNSSSSSSTTTTTTTSSSSSSIIIIIIIIQQQQQQQQQEEEEEEEEEMMMMMMMMFFFFFFFFFFFRRRRRRRRRRRRRRRRRRRRRRVVVVVVVSSSSSSEEEEEEEEEQQQQQQQQQFFFFFFFFFFFTTTTTTTAAAAAMMMMMMMMFFFFFFFFFFFRRRRRRRRRRRRRRRRRRRRRRKKKKKKKKKAAAAAFFFFFFFFFFFLLLLLLLLHHHHHHHHHHWWWWWWWWWWWWWWYYYYYYYYYYYYTTTTTTTGGGGEEEEEEEEEGGGGMMMMMMMMDDDDDDDDEEEEEEEEEMMMMMMMMEEEEEEEEEFFFFFFFFFFFTTTTTTTEEEEEEEEEAAAAAEEEEEEEEESSSSSSNNNNNNNNMMMMMMMMNNNNNNNNDDDDDDDDLLLLLLLLVVVVVVVSSSSSSEEEEEEEEEYYYYYYYYYYYYQQQQQQQQQQQQQQQQQQYYYYYYYYYYYYQQQQQQQQQDDDDDDDDAAAAATTTTTTTAAAAADDDDDDDDEEEEEEEEEEEEEEEEEEAAAAAEEEEEEEEEYYYYYYYYYYYYEEEEEEEEEDDDDDDDDEEEEEEEEEEEEEEEEEEAAAAAIIIIIIIIQQQQQQQQQDDDDDDDDEEEEEEEEEE

SEQ ID NO: 187 - protein, 3519 aa, Triticum aestivum
MMMMMMMMRRRRRRRRRRREEEEEEEEEIIIIIIIILLLLLLLLHHHHHHHHHHIIIIIIIIQQQQQQQQQGGGGGGGGQQQQQQQQQCCCCCCGGGGNNNNNNNNQQQQQQQQQIIIIIIIIGGGGSSSSSSKKKKKKKKKFFFFFFFFFFFWWWWWWWWWWWWWWEEEEEEEEEVVVVVVVVVVVVVVCCCCCCDDDDDDDDEEEEEEEEEHHHHHHHHHHGGGGIIIIIIIIDDDDDDDDPPPPPPPTTTTTTTGGGGRRRRRRRRRRRYYYYYYYYYYYYVVVVVVVGGGGTTTTTTTSSSSSSDDDDDDDDLLLLLLLLQQQQQQQQQLLLLLLLLEEEEEEEEERRRRRRRRRRRVVVVVVVNNNNNNNNVVVVVVVYYYYYYYYYYYYYYYYYYYYYYYYNNNNNNNNEEEEEEEEEAAAAASSSSSSCCCCCCGGGGRRRRRRRRRRRFFFFFFFFFFFVVVVVVVPPPPPPPRRRRRRRRRRRAAAAAVVVVVVVLLLLLLLLMMMMMMMMDDDDDDDDLLLLLLLLEEEEEEEEEPPPPPPPGGGGTTTTTTTMMMMMMMMDDDDDDDDSSSSSSVVVVVVVRRRRRRRRRRRTTTTTTTGGGGPPPPPPPYYYYYYYYYYYYGGGGQQQQQQQQQIIIIIIIIFFFFFFFFFFFRRRRRRRRRRRPPPPPPPDDDDDDDDNNNNNNNNFFFFFFFFFFFVVVVVVVFFFFFFFFFFFGGGGQQQQQQQQQSSSSSSGGGGAAAAAGGGGNNNNNNNNNNNNNNNNWWWWWWWWWWWWWWAAAAAKKKKKKKKKGGGGHHHHHHHHHHYYYYYYYYYYYYTTTTTTTEEEEEEEEEGGGGAAAAAEEEEEEEEELLLLLLLLIIIIIIIIDDDDDDDDSSSSSSVVVVVVVLLLLLLLLDDDDDDDDVVVVVVVVVVVVVVRRRRRRRRRRRKKKKKKKKKEEEEEEEEEAAAAAEEEEEEEEENNNNNNNNCCCCCCDDDDDDDDCCCCCCLLLLLLLLQQQQQQQQQGGGGFFFFFFFFFFFQQQQQQQQQVVVVVVVCCCCCCHHHHHHHHHHSSSSSSLLLLLLLLGGGGGGGGGGGGTTTTTTTGGGGSSSSSSGGGGMMMMMMMMGGGGTTTTTTTLLLLLLLLLLLLLLLLIIIIIIIISSSSSSKKKKKKKKKIIIIIIIIRRRRRRRRRRREEEEEEEEEEEEEEEEEEYYYYYYYYYYYYPPPPPPPDDDDDDDDRRRRRRRRRRRMMMMMMMMMMMMMMMMLLLLLLLLTTTTTTTFFFFFFFFFFFSSSSSSVVVVVVVFFFFFFFFFFFPPPPPPPSSSSSSPPPPPPPKKKKKKKKKVVVVVVVSSSSSSDDDDDDDDTTTTTTTVVVVVVVVVVVVVVEEEEEEEEEPPPPPPPYYYYYYYYYYYYNNNNNNNNAAAAATTTTTTTLLLLLLLLSSSSSSVVVVVVVHHHHHHHHHHQQQQQQQQQLLLLLLLLVVVVVVVEEEEEEEEENNNNNNNNAAAAADDDDDDDDEEEEEEEEECCCCCCMMMMMMMMVVVVVVVLLLLLLLLDDDDDDDDNNNNNNNNEEEEEEEEEAAAAALLLLLLLLYYYYYYYYYYYYDDDDDDDDIIIIIIIICCCCCCFFFFFFFFFFFRRRRRRRRRRRTTTTTTTLLLLLLLLKKKKKKKKKLLLLLLLLTTTTTTTTTTTTTTPPPPPPPSSSSSSFFFFFFFFFFFGGGGDDDDDDDDLLLLLLLLNNNNNNNNHHHHHHHHHHLLLLLLLLIIIIIIIISSSSSSAAAAATTTTTTTMMMMMMMMSSSSSSGGGGVVVVVVVTTTTTTTCCCCCCCCCCCCLLLLLLLLRRRRRRRRRRRFFFFFFFFFFFPPPPPPPGGGGQQQQQQQQQLLLLLLLLNNNNNNNNSSSSSSDDDDDDDDLLLLLLLLRRRRRRRRRRRKKKKKKKKKLLLLLLLLAAAAAVVVVVVVNNNNNNNNLLLLLLLLIIIIIIIIPPPPPPPFFFFFFFFFFFPPPPPPPRRRRRRRRRRRLLLLLLLLHHHHHHHHHHFFFFFFFFFFFFFFFFFFFFFFMMMMMMMMVVVVVVVGGGGFFFFFFFFFFFAAAAAPPPPPPPLLLLLLLLTTTTTTTSSSSSSRRRRRRRRRRRGGGGSSSSSSQQQQQQQQQMMMMMMMMYYYYYYYYYYYYRRRRRRRRRRRSSSSSSLLLLLLLLTTTTTTTVVVVVVVPPPPPPPEEEEEEEEELLLLLLLLTTTTTTTQQQQQQQQQQQQQQQQQQMMMMMMMMWWWWWWWWWWWWWWDDDDDDDDSSSSSSKKKKKKKKKNNNNNNNNMMMMMMMMMMMMMMMMCCCCCCAAAAAAAAAADDDDDDDDPPPPPPPRRRRRRRRRRRHHHHHHHHHHGGGGRRRRRRRRRRRYYYYYYYYYYYYLLLLLLLLTTTTTTTAAAAASSSSSSAAAAAMMMMMMMMFFFFFFFFFFFRRRRRRRRRRRGGGGKKKKKKKKKMMMMMMMMSSSSSSTTTTTTTKKKKKKKKKEEEEEEEEEVVVVVVVDDDDDDDDEEEEEEEEEQQQQQQQQQMMMMMMMMIIIIIIIINNNNNNNNVVVVVVVQQQQQQQQQNNNNNNNNKKKKKKKKKNNNNNNNNSSSSSSSSSSSSYYYYYYYYYYYYFFFFFFFFFFFVVVVVVVEEEEEEEEEWWWWWWWWWWWWWWIIIIIIIIPPPPPPPNNNNNNNNNNNNNNNNVVVVVVVKKKKKKKKKSSSSSSSSSSSSVVVVVVVCCCCCCDDDDDDDDIIIIIIIIAAAAAPPPPPPPRRRRRRRRRRRGGGGLLLLLLLLSSSSSSMMMMMMMMAAAAASSSSSSTTTTTTTFFFFFFFFFFFIIIIIIIIGGGGNNNNNNNNSSSSSSTTTTTTTSSSSSSIIIIIIIIQQQQQQQQQEEEEEEEEEMMMMMMMMFFFFFFFFFFFRRRRRRRRRRRRRRRRRRRRRRVVVVVVVSSSSSSEEEEEEEEEQQQQQQQQQFFFFFFFFFFFTTTTTTTAAAAAMMMMMMMMFFFFFFFFFFFRRRRRRRRRRRRRRRRRRRRRRKKKKKKKKKAAAAAFFFFFFFFFFFLLLLLLLLHHHHHHHHHHWWWWWWWWWWWWWWYYYYYYYYYYYYTTTTTTTGGGGEEEEEEEEEGGGGMMMMMMMMDDDDDDDDEEEEEEEEEMMMMMMMMEEEEEEEEEFFFFFFFFFFFTTTTTTTEEEEEEEEEAAAAAEEEEEEEEESSSSSSNNNNNNNNMMMMMMMMNNNNNNNNDDDDDDDDLLLLLLLLVVVVVVVAAAAAEEEEEEEEEYYYYYYYYYYYYQQQQQQQQQQQQQQQQQQYYYYYYYYYYYYQQQQQQQQQDDDDDDDDAAAAATTTTTTTAAAAADDDDDDDDEEEEEEEEEEEEEEEEEEEEEEEEEEEEEEEEEEEELLLLLLLLYYYYYYYYYYYYEEEEEEEEEDDDDDDDDEEEEEEEEEDDDDDDDDDDDDDDDDAAAAADDDDDDDDLLLLLLLLQQQQQQQQQEEEEEEEEEE

SEQ ID NO: 188 - protein, 3540 aa, Arabidopsis thaliana
MMMMMMMMRRRRRRRRRRREEEEEEEEEIIIIIIIILLLLLLLLHHHHHHHHHHIIIIIIIIQQQQQQQQQGGGGGGGGQQQQQQQQQCCCCCCGGGGNNNNNNNNQQQQQQQQQIIIIIIIIGGGGSSSSSSKKKKKKKKKFFFFFFFFFFFWWWWWWWWWWWWWWEEEEEEEEEVVVVVVVVVVVVVVCCCCCCDDDDDDDDEEEEEEEEEHHHHHHHHHHGGGGIIIIIIIIDDDDDDDDPPPPPPPTTTTTTTGGGGRRRRRRRRRRRYYYYYYYYYYYYVVVVVVVGGGGNNNNNNNNSSSSSSDDDDDDDDLLLLLLLLQQQQQQQQQLLLLLLLLEEEEEEEEERRRRRRRRRRRVVVVVVVNNNNNNNNVVVVVVVYYYYYYYYYYYYYYYYYYYYYYYYNNNNNNNNEEEEEEEEEAAAAASSSSSSCCCCCCGGGGRRRRRRRRRRRYYYYYYYYYYYYVVVVVVVPPPPPPPRRRRRRRRRRRAAAAAIIIIIIIILLLLLLLLMMMMMMMMDDDDDDDDLLLLLLLLEEEEEEEEEPPPPPPPGGGGTTTTTTTMMMMMMMMDDDDDDDDSSSSSSVVVVVVVRRRRRRRRRRRTTTTTTTGGGGPPPPPPPYYYYYYYYYYYYGGGGQQQQQQQQQIIIIIIIIFFFFFFFFFFFRRRRRRRRRRRPPPPPPPDDDDDDDDNNNNNNNNFFFFFFFFFFFVVVVVVVFFFFFFFFFFFGGGGQQQQQQQQQSSSSSSGGGGAAAAAGGGGNNNNNNNNNNNNNNNNWWWWWWWWWWWWWWAAAAAKKKKKKKKKGGGGHHHHHHHHHHYYYYYYYYYYYYTTTTTTTEEEEEEEEEGGGGAAAAAEEEEEEEEELLLLLLLLIIIIIIIIDDDDDDDDAAAAAVVVVVVVLLLLLLLLDDDDDDDDVVVVVVVVVVVVVVRRRRRRRRRRRKKKKKKKKKEEEEEEEEEAAAAAEEEEEEEEENNNNNNNNCCCCCCDDDDDDDDCCCCCCLLLLLLLLQQQQQQQQQGGGGFFFFFFFFFFFQQQQQQQQQVVVVVVVCCCCCCHHHHHHHHHHSSSSSSLLLLLLLLGGGGGGGGGGGGTTTTTTTGGGGSSSSSSGGGGMMMMMMMMGGGGTTTTTTTLLLLLLLLLLLLLLLLIIIIIIIISSSSSSKKKKKKKKKIIIIIIIIRRRRRRRRRRREEEEEEEEEEEEEEEEEEYYYYYYYYYYYYPPPPPPPDDDDDDDDRRRRRRRRRRRMMMMMMMMMMMMMMMMLLLLLLLLTTTTTTTFFFFFFFFFFFSSSSSSVVVVVVVFFFFFFFFFFFPPPPPPPSSSSSSPPPPPPPKKKKKKKKKVVVVVVVSSSSSSDDDDDDDDTTTTTTTVVVVVVVVVVVVVVEEEEEEEEEPPPPPPPYYYYYYYYYYYYNNNNNNNNAAAAATTTTTTTLLLLLLLLSSSSSSVVVVVVVHHHHHHHHHHQQQQQQQQQLLLLLLLLVVVVVVVEEEEEEEEENNNNNNNNAAAAADDDDDDDDEEEEEEEEECCCCCCMMMMMMMMVVVVVVVLLLLLLLLDDDDDDDDNNNNNNNNEEEEEEEEEAAAAALLLLLLLLYYYYYYYYYYYYDDDDDDDDIIIIIIIICCCCCCFFFFFFFFFFFRRRRRRRRRRRTTTTTTTLLLLLLLLKKKKKKKKKLLLLLLLLTTTTTTTTTTTTTTPPPPPPPSSSSSSFFFFFFFFFFFGGGGDDDDDDDDLLLLLLLLNNNNNNNNHHHHHHHHHHLLLLLLLLIIIIIIIISSSSSSAAAAATTTTTTTMMMMMMMMSSSSSSGGGGVVVVVVVTTTTTTTCCCCCCCCCCCCLLLLLLLLRRRRRRRRRRRFFFFFFFFFFFPPPPPPPGGGGQQQQQQQQQLLLLLLLLNNNNNNNNSSSSSSDDDDDDDDLLLLLLLLRRRRRRRRRRRKKKKKKKKKLLLLLLLLAAAAAVVVVVVVNNNNNNNNLLLLLLLLIIIIIIIIPPPPPPPFFFFFFFFFFFPPPPPPPRRRRRRRRRRRLLLLLLLLHHHHHHHHHHFFFFFFFFFFFFFFFFFFFFFFMMMMMMMMVVVVVVVGGGGFFFFFFFFFFFAAAAAPPPPPPPLLLLLLLLTTTTTTTSSSSSSRRRRRRRRRRRGGGGSSSSSSQQQQQQQQQQQQQQQQQQYYYYYYYYYYYYRRRRRRRRRRRAAAAALLLLLLLLTTTTTTTVVVVVVVPPPPPPPEEEEEEEEELLLLLLLLTTTTTTTQQQQQQQQQQQQQQQQQQMMMMMMMMWWWWWWWWWWWWWWDDDDDDDDSSSSSSKKKKKKKKKNNNNNNNNMMMMMMMMMMMMMMMMCCCCCCAAAAAAAAAADDDDDDDDPPPPPPPRRRRRRRRRRRHHHHHHHHHHGGGGRRRRRRRRRRRYYYYYYYYYYYYLLLLLLLLTTTTTTTAAAAASSSSSSAAAAAMMMMMMMMFFFFFFFFFFFRRRRRRRRRRRGGGGKKKKKKKKKMMMMMMMMSSSSSSTTTTTTTKKKKKKKKKEEEEEEEEEVVVVVVVDDDDDDDDEEEEEEEEEQQQQQQQQQMMMMMMMMIIIIIIIINNNNNNNNVVVVVVVQQQQQQQQQNNNNNNNNKKKKKKKKKNNNNNNNNSSSSSSSSSSSSYYYYYYYYYYYYFFFFFFFFFFFVVVVVVVEEEEEEEEEWWWWWWWWWWWWWWIIIIIIIIPPPPPPPNNNNNNNNNNNNNNNNVVVVVVVKKKKKKKKKSSSSSSSSSSSSVVVVVVVCCCCCCDDDDDDDDIIIIIIIIAAAAAPPPPPPPRRRRRRRRRRRGGGGLLLLLLLLSSSSSSMMMMMMMMAAAAASSSSSSTTTTTTTFFFFFFFFFFFIIIIIIIIGGGGNNNNNNNNSSSSSSTTTTTTTSSSSSSIIIIIIIIQQQQQQQQQEEEEEEEEEMMMMMMMMFFFFFFFFFFFRRRRRRRRRRRRRRRRRRRRRRVVVVVVVSSSSSSEEEEEEEEEQQQQQQQQQFFFFFFFFFFFTTTTTTTAAAAAMMMMMMMMFFFFFFFFFFFRRRRRRRRRRRRRRRRRRRRRRKKKKKKKKKAAAAAFFFFFFFFFFFLLLLLLLLHHHHHHHHHHWWWWWWWWWWWWWWYYYYYYYYYYYYTTTTTTTGGGGEEEEEEEEEGGGGMMMMMMMMDDDDDDDDEEEEEEEEEMMMMMMMMEEEEEEEEEFFFFFFFFFFFTTTTTTTEEEEEEEEEAAAAAEEEEEEEEESSSSSSNNNNNNNNMMMMMMMMNNNNNNNNDDDDDDDDLLLLLLLLVVVVVVVSSSSSSEEEEEEEEEYYYYYYYYYYYYQQQQQQQQQQQQQQQQQQYYYYYYYYYYYYQQQQQQQQQDDDDDDDDAAAAATTTTTTTAAAAADDDDDDDDDDDDDDDDEEEEEEEEEGGGGEEEEEEEEEYYYYYYYYYYYYEEEEEEEEEEEEEEEEEEDDDDDDDDEEEEEEEEEDDDDDDDDEEEEEEEEEEEEEEEEEEEEEEEEEEEIIIIIIIILLLLLLLLDDDDDDDDHHHHHHHHHHEEEEEEEEEE

SEQ ID NO: 189 - protein, 3519 aa, Gallus gallus
MMMMMMMMRRRRRRRRRRREEEEEEEEEIIIIIIIIVVVVVVVHHHHHHHHHHLLLLLLLLQQQQQQQQQIIIIIIIIGGGGQQQQQQQQQCCCCCCGGGGNNNNNNNNQQQQQQQQQIIIIIIIIGGGGAAAAAKKKKKKKKKFFFFFFFFFFFWWWWWWWWWWWWWWEEEEEEEEEVVVVVVVIIIIIIIISSSSSSDDDDDDDDEEEEEEEEEHHHHHHHHHHGGGGIIIIIIIIDDDDDDDDIIIIIIIIAAAAAGGGGNNNNNNNNYYYYYYYYYYYYCCCCCCGGGGNNNNNNNNAAAAASSSSSSLLLLLLLLQQQQQQQQQLLLLLLLLEEEEEEEEERRRRRRRRRRRIIIIIIIINNNNNNNNVVVVVVVYYYYYYYYYYYYFFFFFFFFFFFNNNNNNNNEEEEEEEEEAAAAAYYYYYYYYYYYYSSSSSSHHHHHHHHHHKKKKKKKKKYYYYYYYYYYYYVVVVVVVPPPPPPPRRRRRRRRRRRSSSSSSIIIIIIIILLLLLLLLVVVVVVVDDDDDDDDLLLLLLLLEEEEEEEEEPPPPPPPGGGGTTTTTTTMMMMMMMMDDDDDDDDSSSSSSVVVVVVVRRRRRRRRRRRSSSSSSSSSSSSKKKKKKKKKIIIIIIIIGGGGPPPPPPPLLLLLLLLFFFFFFFFFFFRRRRRRRRRRRPPPPPPPDDDDDDDDNNNNNNNNFFFFFFFFFFFIIIIIIIIHHHHHHHHHHGGGGNNNNNNNNSSSSSSGGGGAAAAAGGGGNNNNNNNNNNNNNNNNWWWWWWWWWWWWWWAAAAAKKKKKKKKKGGGGHHHHHHHHHHYYYYYYYYYYYYTTTTTTTEEEEEEEEEGGGGAAAAAEEEEEEEEELLLLLLLLIIIIIIIIEEEEEEEEENNNNNNNNVVVVVVVMMMMMMMMDDDDDDDDVVVVVVVVVVVVVVRRRRRRRRRRRNNNNNNNNEEEEEEEEECCCCCCEEEEEEEEESSSSSSCCCCCCDDDDDDDDCCCCCCLLLLLLLLQQQQQQQQQGGGGFFFFFFFFFFFQQQQQQQQQLLLLLLLLIIIIIIIIHHHHHHHHHHSSSSSSLLLLLLLLGGGGGGGGGGGGTTTTTTTGGGGSSSSSSGGGGMMMMMMMMGGGGTTTTTTTLLLLLLLLLLLLLLLLIIIIIIIINNNNNNNNKKKKKKKKKIIIIIIIIRRRRRRRRRRREEEEEEEEEEEEEEEEEEYYYYYYYYYYYYPPPPPPPDDDDDDDDRRRRRRRRRRRIIIIIIIIMMMMMMMMNNNNNNNNTTTTTTTFFFFFFFFFFFSSSSSSVVVVVVVVVVVVVVPPPPPPPSSSSSSPPPPPPPKKKKKKKKKVVVVVVVSSSSSSDDDDDDDDTTTTTTTVVVVVVVVVVVVVVEEEEEEEEEPPPPPPPYYYYYYYYYYYYNNNNNNNNAAAAAIIIIIIIILLLLLLLLSSSSSSIIIIIIIIHHHHHHHHHHQQQQQQQQQLLLLLLLLIIIIIIIIEEEEEEEEENNNNNNNNTTTTTTTDDDDDDDDEEEEEEEEETTTTTTTFFFFFFFFFFFCCCCCCIIIIIIIIDDDDDDDDNNNNNNNNEEEEEEEEEAAAAALLLLLLLLYYYYYYYYYYYYDDDDDDDDIIIIIIIICCCCCCFFFFFFFFFFFRRRRRRRRRRRTTTTTTTLLLLLLLLKKKKKKKKKLLLLLLLLTTTTTTTNNNNNNNNPPPPPPPTTTTTTTYYYYYYYYYYYYGGGGDDDDDDDDLLLLLLLLNNNNNNNNHHHHHHHHHHLLLLLLLLVVVVVVVSSSSSSLLLLLLLLTTTTTTTMMMMMMMMSSSSSSGGGGVVVVVVVTTTTTTTTTTTTTTSSSSSSLLLLLLLLRRRRRRRRRRRFFFFFFFFFFFPPPPPPPGGGGQQQQQQQQQLLLLLLLLNNNNNNNNAAAAADDDDDDDDLLLLLLLLRRRRRRRRRRRKKKKKKKKKLLLLLLLLAAAAAVVVVVVVNNNNNNNNMMMMMMMMVVVVVVVPPPPPPPFFFFFFFFFFFPPPPPPPRRRRRRRRRRRLLLLLLLLHHHHHHHHHHFFFFFFFFFFFFFFFFFFFFFFMMMMMMMMPPPPPPPGGGGFFFFFFFFFFFAAAAAPPPPPPPLLLLLLLLTTTTTTTAAAAARRRRRRRRRRRGGGGSSSSSSQQQQQQQQQQQQQQQQQQYYYYYYYYYYYYRRRRRRRRRRRAAAAALLLLLLLLSSSSSSVVVVVVVPPPPPPPEEEEEEEEELLLLLLLLTTTTTTTQQQQQQQQQQQQQQQQQQMMMMMMMMFFFFFFFFFFFDDDDDDDDAAAAARRRRRRRRRRRNNNNNNNNMMMMMMMMMMMMMMMMAAAAAAAAAACCCCCCDDDDDDDDPPPPPPPRRRRRRRRRRRRRRRRRRRRRRGGGGRRRRRRRRRRRYYYYYYYYYYYYLLLLLLLLTTTTTTTVVVVVVVAAAAACCCCCCIIIIIIIIFFFFFFFFFFFRRRRRRRRRRRGGGGRRRRRRRRRRRMMMMMMMMSSSSSSTTTTTTTRRRRRRRRRRREEEEEEEEEVVVVVVVDDDDDDDDEEEEEEEEEQQQQQQQQQLLLLLLLLLLLLLLLLSSSSSSVVVVVVVQQQQQQQQQTTTTTTTKKKKKKKKKNNNNNNNNSSSSSSSSSSSSYYYYYYYYYYYYFFFFFFFFFFFVVVVVVVEEEEEEEEEWWWWWWWWWWWWWWIIIIIIIIPPPPPPPNNNNNNNNNNNNNNNNVVVVVVVKKKKKKKKKVVVVVVVAAAAAVVVVVVVCCCCCCDDDDDDDDIIIIIIIIPPPPPPPPPPPPPPRRRRRRRRRRRGGGGLLLLLLLLKKKKKKKKKMMMMMMMMAAAAAAAAAATTTTTTTFFFFFFFFFFFIIIIIIIIGGGGNNNNNNNNNNNNNNNNTTTTTTTAAAAAIIIIIIIIQQQQQQQQQEEEEEEEEELLLLLLLLFFFFFFFFFFFIIIIIIIIRRRRRRRRRRRVVVVVVVSSSSSSEEEEEEEEEQQQQQQQQQFFFFFFFFFFFSSSSSSAAAAAMMMMMMMMFFFFFFFFFFFRRRRRRRRRRRRRRRRRRRRRRKKKKKKKKKAAAAAFFFFFFFFFFFLLLLLLLLHHHHHHHHHHWWWWWWWWWWWWWWYYYYYYYYYYYYTTTTTTTGGGGEEEEEEEEEGGGGMMMMMMMMDDDDDDDDEEEEEEEEEMMMMMMMMEEEEEEEEEFFFFFFFFFFFSSSSSSEEEEEEEEEAAAAAEEEEEEEEEGGGGNNNNNNNNTTTTTTTNNNNNNNNDDDDDDDDLLLLLLLLVVVVVVVSSSSSSEEEEEEEEEYYYYYYYYYYYYQQQQQQQQQQQQQQQQQQYYYYYYYYYYYYQQQQQQQQQDDDDDDDDAAAAATTTTTTTAAAAADDDDDDDDVVVVVVVEEEEEEEEEEEEEEEEEEYYYYYYYYYYYYEEEEEEEEEEEEEEEEEEAAAAAEEEEEEEEEAAAAASSSSSSPPPPPPPEEEEEEEEEKKKKKKKKKEEEEEEEEETTTTTTTT

SEQ ID NO: 190 - protein, 3511 aa, Ectocarpus variabilis
MMMMMMMMRRRRRRRRRRREEEEEEEEEIIIIIIIIVVVVVVVHHHHHHHHHHVVVVVVVQQQQQQQQQAAAAAGGGGQQQQQQQQQCCCCCCGGGGNNNNNNNNQQQQQQQQQIIIIIIIIGGGGSSSSSSKKKKKKKKKFFFFFFFFFFFWWWWWWWWWWWWWWEEEEEEEEEVVVVVVVIIIIIIIISSSSSSDDDDDDDDEEEEEEEEEHHHHHHHHHHGGGGIIIIIIIIDDDDDDDDPPPPPPPTTTTTTTGGGGRRRRRRRRRRRYYYYYYYYYYYYHHHHHHHHHHGGGGDDDDDDDDSSSSSSDDDDDDDDLLLLLLLLQQQQQQQQQLLLLLLLLEEEEEEEEERRRRRRRRRRRIIIIIIIINNNNNNNNCCCCCCYYYYYYYYYYYYFFFFFFFFFFFNNNNNNNNEEEEEEEEEAAAAATTTTTTTAAAAAGGGGRRRRRRRRRRRYYYYYYYYYYYYVVVVVVVPPPPPPPRRRRRRRRRRRAAAAAIIIIIIIILLLLLLLLMMMMMMMMDDDDDDDDLLLLLLLLEEEEEEEEEPPPPPPPGGGGTTTTTTTMMMMMMMMDDDDDDDDSSSSSSVVVVVVVRRRRRRRRRRRAAAAAGGGGPPPPPPPFFFFFFFFFFFGGGGQQQQQQQQQLLLLLLLLFFFFFFFFFFFRRRRRRRRRRRPPPPPPPDDDDDDDDNNNNNNNNFFFFFFFFFFFVVVVVVVFFFFFFFFFFFGGGGQQQQQQQQQTTTTTTTGGGGAAAAAGGGGNNNNNNNNNNNNNNNNWWWWWWWWWWWWWWAAAAAKKKKKKKKKGGGGHHHHHHHHHHYYYYYYYYYYYYTTTTTTTEEEEEEEEEGGGGAAAAAEEEEEEEEELLLLLLLLIIIIIIIIDDDDDDDDSSSSSSVVVVVVVLLLLLLLLDDDDDDDDVVVVVVVVVVVVVVRRRRRRRRRRRKKKKKKKKKEEEEEEEEEAAAAAEEEEEEEEESSSSSSCCCCCCDDDDDDDDAAAAALLLLLLLLQQQQQQQQQGGGGFFFFFFFFFFFQQQQQQQQQLLLLLLLLTTTTTTTHHHHHHHHHHSSSSSSMMMMMMMMGGGGGGGGGGGGTTTTTTTGGGGAAAAAGGGGMMMMMMMMGGGGTTTTTTTLLLLLLLLLLLLLLLLIIIIIIIISSSSSSKKKKKKKKKVVVVVVVRRRRRRRRRRREEEEEEEEEEEEEEEEEEYYYYYYYYYYYYPPPPPPPDDDDDDDDRRRRRRRRRRRIIIIIIIIMMMMMMMMSSSSSSTTTTTTTYYYYYYYYYYYYSSSSSSVVVVVVVIIIIIIIIPPPPPPPSSSSSSPPPPPPPKKKKKKKKKVVVVVVVSSSSSSDDDDDDDDTTTTTTTVVVVVVVVVVVVVVEEEEEEEEEPPPPPPPYYYYYYYYYYYYNNNNNNNNAAAAATTTTTTTLLLLLLLLSSSSSSVVVVVVVHHHHHHHHHHQQQQQQQQQLLLLLLLLVVVVVVVEEEEEEEEENNNNNNNNAAAAADDDDDDDDQQQQQQQQQCCCCCCFFFFFFFFFFFTTTTTTTLLLLLLLLDDDDDDDDNNNNNNNNEEEEEEEEEAAAAALLLLLLLLYYYYYYYYYYYYDDDDDDDDIIIIIIIICCCCCCFFFFFFFFFFFRRRRRRRRRRRTTTTTTTLLLLLLLLKKKKKKKKKLLLLLLLLTTTTTTTTTTTTTTPPPPPPPTTTTTTTYYYYYYYYYYYYGGGGDDDDDDDDLLLLLLLLNNNNNNNNHHHHHHHHHHLLLLLLLLVVVVVVVSSSSSSAAAAAAAAAAIIIIIIIICCCCCCGGGGTTTTTTTTTTTTTTCCCCCCSSSSSSLLLLLLLLRRRRRRRRRRRFFFFFFFFFFFPPPPPPPGGGGQQQQQQQQQLLLLLLLLNNNNNNNNCCCCCCDDDDDDDDLLLLLLLLRRRRRRRRRRRKKKKKKKKKLLLLLLLLAAAAAVVVVVVVNNNNNNNNMMMMMMMMVVVVVVVPPPPPPPFFFFFFFFFFFPPPPPPPRRRRRRRRRRRLLLLLLLLHHHHHHHHHHFFFFFFFFFFFFFFFFFFFFFFMMMMMMMMIIIIIIIIGGGGFFFFFFFFFFFAAAAAPPPPPPPLLLLLLLLTTTTTTTSSSSSSRRRRRRRRRRRGGGGSSSSSSQQQQQQQQQQQQQQQQQQYYYYYYYYYYYYRRRRRRRRRRRAAAAALLLLLLLLTTTTTTTVVVVVVVPPPPPPPEEEEEEEEELLLLLLLLTTTTTTTQQQQQQQQQQQQQQQQQQCCCCCCFFFFFFFFFFFDDDDDDDDSSSSSSKKKKKKKKKNNNNNNNNMMMMMMMMMMMMMMMMCCCCCCAAAAAAAAAADDDDDDDDPPPPPPPRRRRRRRRRRRHHHHHHHHHHGGGGRRRRRRRRRRRYYYYYYYYYYYYLLLLLLLLTTTTTTTCCCCCCAAAAAVVVVVVVMMMMMMMMFFFFFFFFFFFRRRRRRRRRRRGGGGRRRRRRRRRRRMMMMMMMMSSSSSSTTTTTTTKKKKKKKKKEEEEEEEEEVVVVVVVDDDDDDDDEEEEEEEEEQQQQQQQQQMMMMMMMMLLLLLLLLNNNNNNNNVVVVVVVVVVVVVVNNNNNNNNKKKKKKKKKNNNNNNNNSSSSSSSSSSSSYYYYYYYYYYYYFFFFFFFFFFFVVVVVVVEEEEEEEEEWWWWWWWWWWWWWWIIIIIIIIPPPPPPPNNNNNNNNNNNNNNNNVVVVVVVKKKKKKKKKAAAAASSSSSSIIIIIIIICCCCCCDDDDDDDDIIIIIIIIPPPPPPPPPPPPPPKKKKKKKKKGGGGLLLLLLLLKKKKKKKKKMMMMMMMMSSSSSSTTTTTTTTTTTTTTFFFFFFFFFFFVVVVVVVGGGGNNNNNNNNTTTTTTTTTTTTTTAAAAAIIIIIIIIQQQQQQQQQEEEEEEEEEVVVVVVVWWWWWWWWWWWWWWKKKKKKKKKRRRRRRRRRRRVVVVVVVAAAAAEEEEEEEEEQQQQQQQQQFFFFFFFFFFFTTTTTTTAAAAAMMMMMMMMFFFFFFFFFFFRRRRRRRRRRRRRRRRRRRRRRKKKKKKKKKAAAAAFFFFFFFFFFFLLLLLLLLHHHHHHHHHHWWWWWWWWWWWWWWYYYYYYYYYYYYTTTTTTTGGGGEEEEEEEEEGGGGMMMMMMMMDDDDDDDDEEEEEEEEEMMMMMMMMEEEEEEEEEFFFFFFFFFFFTTTTTTTEEEEEEEEEAAAAAEEEEEEEEESSSSSSNNNNNNNNMMMMMMMMNNNNNNNNDDDDDDDDLLLLLLLLVVVVVVVSSSSSSEEEEEEEEEYYYYYYYYYYYYQQQQQQQQQQQQQQQQQQYYYYYYYYYYYYQQQQQQQQQDDDDDDDDAAAAATTTTTTTAAAAAEEEEEEEEEEEEEEEEEEEEEEEEEEEGGGGEEEEEEEEEFFFFFFFFFFFDDDDDDDDEEEEEEEEEDDDDDDDDEEEEEEEEEEEEEEEEEELLLLLLLLDDDDDDDDDDDDDDDDGGGGMMMMMMMMMMMMMMMMM

SEQ ID NO: 191 - protein, 3512 aa, Zea mays
MMMMMMMMRRRRRRRRRRREEEEEEEEEIIIIIIIILLLLLLLLHHHHHHHHHHIIIIIIIIQQQQQQQQQGGGGGGGGQQQQQQQQQCCCCCCGGGGNNNNNNNNQQQQQQQQQIIIIIIIIGGGGAAAAAKKKKKKKKKFFFFFFFFFFFWWWWWWWWWWWWWWEEEEEEEEEVVVVVVVVVVVVVVCCCCCCDDDDDDDDEEEEEEEEEHHHHHHHHHHGGGGIIIIIIIIDDDDDDDDPPPPPPPTTTTTTTGGGGRRRRRRRRRRRYYYYYYYYYYYYTTTTTTTGGGGNNNNNNNNSSSSSSDDDDDDDDLLLLLLLLQQQQQQQQQLLLLLLLLEEEEEEEEERRRRRRRRRRRVVVVVVVNNNNNNNNVVVVVVVYYYYYYYYYYYYYYYYYYYYYYYYNNNNNNNNEEEEEEEEEAAAAASSSSSSCCCCCCGGGGRRRRRRRRRRRFFFFFFFFFFFVVVVVVVPPPPPPPRRRRRRRRRRRAAAAAVVVVVVVLLLLLLLLMMMMMMMMDDDDDDDDLLLLLLLLEEEEEEEEEPPPPPPPGGGGTTTTTTTMMMMMMMMDDDDDDDDSSSSSSVVVVVVVRRRRRRRRRRRTTTTTTTGGGGPPPPPPPYYYYYYYYYYYYGGGGQQQQQQQQQIIIIIIIIFFFFFFFFFFFRRRRRRRRRRRPPPPPPPDDDDDDDDNNNNNNNNFFFFFFFFFFFVVVVVVVFFFFFFFFFFFGGGGQQQQQQQQQSSSSSSGGGGAAAAAGGGGNNNNNNNNNNNNNNNNWWWWWWWWWWWWWWAAAAAKKKKKKKKKGGGGHHHHHHHHHHYYYYYYYYYYYYTTTTTTTEEEEEEEEEGGGGAAAAAEEEEEEEEELLLLLLLLIIIIIIIIDDDDDDDDSSSSSSVVVVVVVLLLLLLLLDDDDDDDDVVVVVVVVVVVVVVRRRRRRRRRRRKKKKKKKKKEEEEEEEEEAAAAAEEEEEEEEENNNNNNNNCCCCCCDDDDDDDDCCCCCCLLLLLLLLQQQQQQQQQGGGGFFFFFFFFFFFQQQQQQQQQVVVVVVVCCCCCCHHHHHHHHHHSSSSSSLLLLLLLLGGGGGGGGGGGGTTTTTTTGGGGSSSSSSGGGGMMMMMMMMGGGGTTTTTTTLLLLLLLLLLLLLLLLIIIIIIIISSSSSSKKKKKKKKKIIIIIIIIRRRRRRRRRRREEEEEEEEEEEEEEEEEEYYYYYYYYYYYYPPPPPPPDDDDDDDDRRRRRRRRRRRMMMMMMMMMMMMMMMMLLLLLLLLTTTTTTTFFFFFFFFFFFSSSSSSVVVVVVVFFFFFFFFFFFPPPPPPPSSSSSSPPPPPPPKKKKKKKKKVVVVVVVSSSSSSDDDDDDDDTTTTTTTVVVVVVVVVVVVVVEEEEEEEEEPPPPPPPYYYYYYYYYYYYNNNNNNNNAAAAATTTTTTTLLLLLLLLSSSSSSVVVVVVVHHHHHHHHHHQQQQQQQQQLLLLLLLLVVVVVVVEEEEEEEEENNNNNNNNAAAAADDDDDDDDEEEEEEEEECCCCCCMMMMMMMMVVVVVVVLLLLLLLLDDDDDDDDNNNNNNNNEEEEEEEEEAAAAALLLLLLLLYYYYYYYYYYYYDDDDDDDDIIIIIIIICCCCCCFFFFFFFFFFFRRRRRRRRRRRTTTTTTTLLLLLLLLKKKKKKKKKLLLLLLLLTTTTTTTTTTTTTTPPPPPPPSSSSSSFFFFFFFFFFFGGGGDDDDDDDDLLLLLLLLNNNNNNNNHHHHHHHHHHLLLLLLLLIIIIIIIISSSSSSAAAAATTTTTTTMMMMMMMMSSSSSSGGGGVVVVVVVTTTTTTTCCCCCCCCCCCCLLLLLLLLRRRRRRRRRRRFFFFFFFFFFFPPPPPPPGGGGQQQQQQQQQLLLLLLLLNNNNNNNNSSSSSSDDDDDDDDLLLLLLLLRRRRRRRRRRRKKKKKKKKKLLLLLLLLAAAAAVVVVVVVNNNNNNNNLLLLLLLLIIIIIIIIPPPPPPPFFFFFFFFFFFPPPPPPPRRRRRRRRRRRLLLLLLLLHHHHHHHHHHFFFFFFFFFFFFFFFFFFFFFFMMMMMMMMVVVVVVVGGGGFFFFFFFFFFFAAAAAPPPPPPPLLLLLLLLTTTTTTTSSSSSSRRRRRRRRRRRGGGGSSSSSSQQQQQQQQQQQQQQQQQQYYYYYYYYYYYYRRRRRRRRRRRAAAAALLLLLLLLTTTTTTTVVVVVVVPPPPPPPEEEEEEEEELLLLLLLLTTTTTTTQQQQQQQQQQQQQQQQQQMMMMMMMMWWWWWWWWWWWWWWDDDDDDDDAAAAAKKKKKKKKKNNNNNNNNMMMMMMMMMMMMMMMMCCCCCCAAAAAAAAAADDDDDDDDPPPPPPPRRRRRRRRRRRHHHHHHHHHHGGGGRRRRRRRRRRRYYYYYYYYYYYYLLLLLLLLTTTTTTTAAAAASSSSSSAAAAAMMMMMMMMFFFFFFFFFFFRRRRRRRRRRRGGGGKKKKKKKKKMMMMMMMMSSSSSSTTTTTTTKKKKKKKKKEEEEEEEEEVVVVVVVDDDDDDDDEEEEEEEEEQQQQQQQQQMMMMMMMMIIIIIIIINNNNNNNNVVVVVVVQQQQQQQQQNNNNNNNNKKKKKKKKKNNNNNNNNSSSSSSSSSSSSYYYYYYYYYYYYFFFFFFFFFFFVVVVVVVEEEEEEEEEWWWWWWWWWWWWWWIIIIIIIIPPPPPPPNNNNNNNNNNNNNNNNVVVVVVVKKKKKKKKKSSSSSSSSSSSSVVVVVVVCCCCCCDDDDDDDDIIIIIIIIPPPPPPPPPPPPPPRRRRRRRRRRRGGGGLLLLLLLLSSSSSSMMMMMMMMAAAAASSSSSSTTTTTTTFFFFFFFFFFFIIIIIIIIGGGGNNNNNNNNSSSSSSTTTTTTTSSSSSSIIIIIIIIQQQQQQQQQEEEEEEEEEMMMMMMMMFFFFFFFFFFFRRRRRRRRRRRRRRRRRRRRRRVVVVVVVSSSSSSEEEEEEEEEQQQQQQQQQFFFFFFFFFFFTTTTTTTAAAAAMMMMMMMMFFFFFFFFFFFRRRRRRRRRRRRRRRRRRRRRRKKKKKKKKKAAAAAFFFFFFFFFFFLLLLLLLLHHHHHHHHHHWWWWWWWWWWWWWWYYYYYYYYYYYYTTTTTTTGGGGEEEEEEEEEGGGGMMMMMMMMDDDDDDDDEEEEEEEEEMMMMMMMMEEEEEEEEEFFFFFFFFFFFTTTTTTTEEEEEEEEEAAAAAEEEEEEEEESSSSSSNNNNNNNNMMMMMMMMNNNNNNNNDDDDDDDDLLLLLLLLVVVVVVVSSSSSSEEEEEEEEEYYYYYYYYYYYYQQQQQQQQQQQQQQQQQQYYYYYYYYYYYYQQQQQQQQQDDDDDDDDAAAAATTTTTTTAAAAADDDDDDDDEEEEEEEEEEEEEEEEEEEEEEEEEEEYYYYYYYYYYYYEEEEEEEEEDDDDDDDDEEEEEEEEEEEEEEEEEEEEEEEEEEEVVVVVVVQQQQQQQQQAAAAADDDDDDDDDDDDDDDDMMMMMMMMM

SEQ ID NO: 192 - protein, 3552 aa, Arabidopsis thaliana
MMMMMMMMRRRRRRRRRRREEEEEEEEEIIIIIIIILLLLLLLLHHHHHHHHHHIIIIIIIIQQQQQQQQQGGGGGGGGQQQQQQQQQCCCCCCGGGGNNNNNNNNQQQQQQQQQIIIIIIIIGGGGSSSSSSKKKKKKKKKFFFFFFFFFFFWWWWWWWWWWWWWWEEEEEEEEEVVVVVVVVVVVVVVNNNNNNNNLLLLLLLLEEEEEEEEEHHHHHHHHHHGGGGIIIIIIIIDDDDDDDDQQQQQQQQQTTTTTTTGGGGRRRRRRRRRRRYYYYYYYYYYYYVVVVVVVGGGGDDDDDDDDSSSSSSEEEEEEEEELLLLLLLLQQQQQQQQQLLLLLLLLEEEEEEEEERRRRRRRRRRRVVVVVVVNNNNNNNNVVVVVVVYYYYYYYYYYYYYYYYYYYYYYYYNNNNNNNNEEEEEEEEEAAAAASSSSSSCCCCCCGGGGRRRRRRRRRRRYYYYYYYYYYYYVVVVVVVPPPPPPPRRRRRRRRRRRAAAAAVVVVVVVLLLLLLLLMMMMMMMMDDDDDDDDLLLLLLLLEEEEEEEEEPPPPPPPGGGGTTTTTTTMMMMMMMMDDDDDDDDSSSSSSVVVVVVVRRRRRRRRRRRSSSSSSGGGGPPPPPPPYYYYYYYYYYYYGGGGQQQQQQQQQIIIIIIIIFFFFFFFFFFFRRRRRRRRRRRPPPPPPPDDDDDDDDNNNNNNNNFFFFFFFFFFFVVVVVVVFFFFFFFFFFFGGGGQQQQQQQQQSSSSSSGGGGAAAAAGGGGNNNNNNNNNNNNNNNNWWWWWWWWWWWWWWAAAAAKKKKKKKKKGGGGHHHHHHHHHHYYYYYYYYYYYYTTTTTTTEEEEEEEEEGGGGAAAAAEEEEEEEEELLLLLLLLIIIIIIIIDDDDDDDDSSSSSSVVVVVVVLLLLLLLLDDDDDDDDVVVVVVVVVVVVVVRRRRRRRRRRRKKKKKKKKKEEEEEEEEEAAAAAEEEEEEEEENNNNNNNNCCCCCCDDDDDDDDCCCCCCLLLLLLLLQQQQQQQQQGGGGFFFFFFFFFFFQQQQQQQQQVVVVVVVCCCCCCHHHHHHHHHHSSSSSSLLLLLLLLGGGGGGGGGGGGTTTTTTTGGGGSSSSSSGGGGMMMMMMMMGGGGTTTTTTTLLLLLLLLLLLLLLLLIIIIIIIISSSSSSKKKKKKKKKIIIIIIIIRRRRRRRRRRREEEEEEEEEEEEEEEEEEYYYYYYYYYYYYPPPPPPPDDDDDDDDRRRRRRRRRRRMMMMMMMMMMMMMMMMMMMMMMMMTTTTTTTFFFFFFFFFFFSSSSSSVVVVVVVFFFFFFFFFFFPPPPPPPSSSSSSPPPPPPPKKKKKKKKKVVVVVVVSSSSSSDDDDDDDDTTTTTTTVVVVVVVVVVVVVVEEEEEEEEEPPPPPPPYYYYYYYYYYYYNNNNNNNNAAAAATTTTTTTLLLLLLLLSSSSSSVVVVVVVHHHHHHHHHHQQQQQQQQQLLLLLLLLVVVVVVVEEEEEEEEENNNNNNNNAAAAADDDDDDDDEEEEEEEEECCCCCCMMMMMMMMVVVVVVVLLLLLLLLDDDDDDDDNNNNNNNNEEEEEEEEEAAAAALLLLLLLLYYYYYYYYYYYYDDDDDDDDIIIIIIIICCCCCCFFFFFFFFFFFRRRRRRRRRRRTTTTTTTLLLLLLLLKKKKKKKKKLLLLLLLLSSSSSSTTTTTTTPPPPPPPSSSSSSFFFFFFFFFFFGGGGDDDDDDDDLLLLLLLLNNNNNNNNHHHHHHHHHHLLLLLLLLIIIIIIIISSSSSSAAAAATTTTTTTMMMMMMMMSSSSSSGGGGVVVVVVVTTTTTTTCCCCCCCCCCCCLLLLLLLLRRRRRRRRRRRFFFFFFFFFFFPPPPPPPGGGGQQQQQQQQQLLLLLLLLNNNNNNNNSSSSSSDDDDDDDDLLLLLLLLRRRRRRRRRRRKKKKKKKKKLLLLLLLLAAAAAVVVVVVVNNNNNNNNLLLLLLLLIIIIIIIIPPPPPPPFFFFFFFFFFFPPPPPPPRRRRRRRRRRRLLLLLLLLHHHHHHHHHHFFFFFFFFFFFFFFFFFFFFFFMMMMMMMMVVVVVVVGGGGFFFFFFFFFFFAAAAAPPPPPPPLLLLLLLLTTTTTTTSSSSSSRRRRRRRRRRRGGGGSSSSSSQQQQQQQQQQQQQQQQQQYYYYYYYYYYYYRRRRRRRRRRRNNNNNNNNLLLLLLLLTTTTTTTVVVVVVVPPPPPPPEEEEEEEEELLLLLLLLTTTTTTTQQQQQQQQQQQQQQQQQQMMMMMMMMWWWWWWWWWWWWWWDDDDDDDDAAAAAKKKKKKKKKNNNNNNNNMMMMMMMMMMMMMMMMCCCCCCAAAAAAAAAADDDDDDDDPPPPPPPRRRRRRRRRRRHHHHHHHHHHGGGGRRRRRRRRRRRYYYYYYYYYYYYLLLLLLLLTTTTTTTAAAAASSSSSSAAAAAMMMMMMMMFFFFFFFFFFFRRRRRRRRRRRGGGGKKKKKKKKKMMMMMMMMSSSSSSTTTTTTTKKKKKKKKKEEEEEEEEEVVVVVVVDDDDDDDDEEEEEEEEEQQQQQQQQQMMMMMMMMLLLLLLLLNNNNNNNNVVVVVVVQQQQQQQQQNNNNNNNNKKKKKKKKKNNNNNNNNSSSSSSSSSSSSYYYYYYYYYYYYFFFFFFFFFFFVVVVVVVEEEEEEEEEWWWWWWWWWWWWWWIIIIIIIIPPPPPPPNNNNNNNNNNNNNNNNVVVVVVVKKKKKKKKKSSSSSSTTTTTTTVVVVVVVCCCCCCDDDDDDDDIIIIIIIIPPPPPPPPPPPPPPTTTTTTTGGGGLLLLLLLLKKKKKKKKKMMMMMMMMAAAAASSSSSSTTTTTTTFFFFFFFFFFFIIIIIIIIGGGGNNNNNNNNSSSSSSTTTTTTTSSSSSSIIIIIIIIQQQQQQQQQEEEEEEEEEMMMMMMMMFFFFFFFFFFFRRRRRRRRRRRRRRRRRRRRRRVVVVVVVSSSSSSEEEEEEEEEQQQQQQQQQFFFFFFFFFFFTTTTTTTAAAAAMMMMMMMMFFFFFFFFFFFRRRRRRRRRRRRRRRRRRRRRRKKKKKKKKKAAAAAFFFFFFFFFFFLLLLLLLLHHHHHHHHHHWWWWWWWWWWWWWWYYYYYYYYYYYYTTTTTTTGGGGEEEEEEEEEGGGGMMMMMMMMDDDDDDDDEEEEEEEEEMMMMMMMMEEEEEEEEEFFFFFFFFFFFTTTTTTTEEEEEEEEEAAAAAEEEEEEEEESSSSSSNNNNNNNNMMMMMMMMNNNNNNNNDDDDDDDDLLLLLLLLVVVVVVVSSSSSSEEEEEEEEEYYYYYYYYYYYYQQQQQQQQQQQQQQQQQQYYYYYYYYYYYYQQQQQQQQQDDDDDDDDAAAAATTTTTTTAAAAADDDDDDDDEEEEEEEEEEEEEEEEEEGGGGEEEEEEEEEYYYYYYYYYYYYEEEEEEEEEEEEEEEEEEEEEEEEEEEEEEEEEEEEAAAAAEEEEEEEEEYYYYYYYYYYYYEEEEEEEEEQQQQQQQQQEEEEEEEEEEEEEEEEEETTTTTTTYYYYYYYYYYYYY

SEQ ID NO: 193 - protein, 3461 aa, Caenorhabditis briggsae
MMMMMMMMRRRRRRRRRRREEEEEEEEEIIIIIIIIVVVVVVVHHHHHHHHHHIIIIIIIIQQQQQQQQQAAAAAGGGGQQQQQQQQQCCCCCCGGGGNNNNNNNNQQQQQQQQQIIIIIIIIGGGGSSSSSSKKKKKKKKKFFFFFFFFFFFWWWWWWWWWWWWWWEEEEEEEEEVVVVVVVIIIIIIIISSSSSSDDDDDDDDEEEEEEEEEHHHHHHHHHHGGGGIIIIIIIIDDDDDDDDPPPPPPPTTTTTTTGGGGQQQQQQQQQYYYYYYYYYYYYVVVVVVVGGGGDDDDDDDDSSSSSSDDDDDDDDLLLLLLLLQQQQQQQQQLLLLLLLLEEEEEEEEERRRRRRRRRRRIIIIIIIINNNNNNNNVVVVVVVYYYYYYYYYYYYYYYYYYYYYYYYNNNNNNNNEEEEEEEEEAAAAAGGGGSSSSSSNNNNNNNNKKKKKKKKKYYYYYYYYYYYYVVVVVVVPPPPPPPRRRRRRRRRRRAAAAAVVVVVVVLLLLLLLLVVVVVVVDDDDDDDDLLLLLLLLEEEEEEEEEPPPPPPPGGGGTTTTTTTMMMMMMMMDDDDDDDDSSSSSSVVVVVVVRRRRRRRRRRRSSSSSSGGGGPPPPPPPFFFFFFFFFFFGGGGQQQQQQQQQLLLLLLLLFFFFFFFFFFFRRRRRRRRRRRPPPPPPPDDDDDDDDNNNNNNNNYYYYYYYYYYYYVVVVVVVFFFFFFFFFFFGGGGQQQQQQQQQSSSSSSGGGGAAAAAGGGGNNNNNNNNNNNNNNNNWWWWWWWWWWWWWWAAAAAKKKKKKKKKGGGGHHHHHHHHHHYYYYYYYYYYYYTTTTTTTEEEEEEEEEGGGGAAAAAEEEEEEEEELLLLLLLLVVVVVVVDDDDDDDDNNNNNNNNVVVVVVVLLLLLLLLDDDDDDDDVVVVVVVVVVVVVVRRRRRRRRRRRKKKKKKKKKEEEEEEEEEAAAAAEEEEEEEEESSSSSSTTTTTTTDDDDDDDDCCCCCCLLLLLLLLQQQQQQQQQGGGGFFFFFFFFFFFQQQQQQQQQLLLLLLLLTTTTTTTHHHHHHHHHHSSSSSSLLLLLLLLGGGGGGGGGGGGTTTTTTTGGGGSSSSSSGGGGMMMMMMMMGGGGTTTTTTTLLLLLLLLLLLLLLLLIIIIIIIISSSSSSKKKKKKKKKIIIIIIIIRRRRRRRRRRREEEEEEEEEEEEEEEEEEYYYYYYYYYYYYPPPPPPPDDDDDDDDRRRRRRRRRRRIIIIIIIIMMMMMMMMNNNNNNNNTTTTTTTFFFFFFFFFFFSSSSSSVVVVVVVVVVVVVVPPPPPPPSSSSSSPPPPPPPKKKKKKKKKVVVVVVVSSSSSSDDDDDDDDTTTTTTTVVVVVVVVVVVVVVEEEEEEEEEPPPPPPPYYYYYYYYYYYYNNNNNNNNAAAAATTTTTTTLLLLLLLLSSSSSSVVVVVVVHHHHHHHHHHQQQQQQQQQLLLLLLLLVVVVVVVEEEEEEEEENNNNNNNNTTTTTTTDDDDDDDDEEEEEEEEETTTTTTTFFFFFFFFFFFCCCCCCIIIIIIIIDDDDDDDDNNNNNNNNEEEEEEEEEAAAAALLLLLLLLYYYYYYYYYYYYDDDDDDDDIIIIIIIICCCCCCFFFFFFFFFFFRRRRRRRRRRRTTTTTTTLLLLLLLLKKKKKKKKKLLLLLLLLTTTTTTTTTTTTTTPPPPPPPTTTTTTTYYYYYYYYYYYYGGGGDDDDDDDDLLLLLLLLNNNNNNNNHHHHHHHHHHLLLLLLLLVVVVVVVSSSSSSAAAAATTTTTTTMMMMMMMMSSSSSSGGGGVVVVVVVTTTTTTTTTTTTTTCCCCCCLLLLLLLLRRRRRRRRRRRFFFFFFFFFFFPPPPPPPGGGGQQQQQQQQQLLLLLLLLNNNNNNNNAAAAADDDDDDDDLLLLLLLLRRRRRRRRRRRKKKKKKKKKLLLLLLLLAAAAAVVVVVVVNNNNNNNNMMMMMMMMVVVVVVVPPPPPPPFFFFFFFFFFFPPPPPPPRRRRRRRRRRRLLLLLLLLHHHHHHHHHHFFFFFFFFFFFFFFFFFFFFFFMMMMMMMMPPPPPPPGGGGFFFFFFFFFFFAAAAAPPPPPPPLLLLLLLLTTTTTTTSSSSSSRRRRRRRRRRRSSSSSSNNNNNNNNQQQQQQQQQQQQQQQQQQYYYYYYYYYYYYRRRRRRRRRRRAAAAAIIIIIIIITTTTTTTVVVVVVVPPPPPPPEEEEEEEEELLLLLLLLTTTTTTTQQQQQQQQQQQQQQQQQQCCCCCCFFFFFFFFFFFDDDDDDDDAAAAAKKKKKKKKKNNNNNNNNMMMMMMMMMMMMMMMMAAAAAAAAAACCCCCCDDDDDDDDPPPPPPPRRRRRRRRRRRHHHHHHHHHHGGGGRRRRRRRRRRRYYYYYYYYYYYYLLLLLLLLTTTTTTTAAAAAAAAAAAAAAAIIIIIIIIFFFFFFFFFFFRRRRRRRRRRRGGGGRRRRRRRRRRRMMMMMMMMSSSSSSMMMMMMMMKKKKKKKKKEEEEEEEEEVVVVVVVDDDDDDDDEEEEEEEEEQQQQQQQQQMMMMMMMMLLLLLLLLNNNNNNNNIIIIIIIIQQQQQQQQQNNNNNNNNKKKKKKKKKNNNNNNNNSSSSSSSSSSSSYYYYYYYYYYYYFFFFFFFFFFFVVVVVVVDDDDDDDDWWWWWWWWWWWWWWIIIIIIIIPPPPPPPNNNNNNNNNNNNNNNNVVVVVVVKKKKKKKKKTTTTTTTAAAAAVVVVVVVCCCCCCDDDDDDDDIIIIIIIIPPPPPPPPPPPPPPRRRRRRRRRRRGGGGLLLLLLLLKKKKKKKKKMMMMMMMMSSSSSSAAAAATTTTTTTFFFFFFFFFFFIIIIIIIIGGGGNNNNNNNNSSSSSSTTTTTTTAAAAAIIIIIIIIQQQQQQQQQEEEEEEEEELLLLLLLLFFFFFFFFFFFKKKKKKKKKRRRRRRRRRRRIIIIIIIISSSSSSEEEEEEEEEQQQQQQQQQFFFFFFFFFFFTTTTTTTAAAAAMMMMMMMMFFFFFFFFFFFRRRRRRRRRRRRRRRRRRRRRRKKKKKKKKKAAAAAFFFFFFFFFFFLLLLLLLLHHHHHHHHHHWWWWWWWWWWWWWWYYYYYYYYYYYYTTTTTTTGGGGEEEEEEEEEGGGGMMMMMMMMDDDDDDDDEEEEEEEEEMMMMMMMMEEEEEEEEEFFFFFFFFFFFTTTTTTTEEEEEEEEEAAAAAEEEEEEEEESSSSSSNNNNNNNNMMMMMMMMNNNNNNNNDDDDDDDDLLLLLLLLVVVVVVVSSSSSSEEEEEEEEEYYYYYYYYYYYYQQQQQQQQQQQQQQQQQQYYYYYYYYYYYYQQQQQQQQQEEEEEEEEEAAAAAAAAAAAAAAADDDDDDDDEEEEEEEEEDDDDDDDDAAAAAAAAAAEEEEEEEEEAAAAAFFFFFFFFFFFDDDDDDDDGGGGEEEEEEEEEE

SEQ ID NO: 194 - protein, 3457 aa, Caenorhabditis elegans
MMMMMMMMRRRRRRRRRRREEEEEEEEEIIIIIIIIVVVVVVVHHHHHHHHHHIIIIIIIIQQQQQQQQQAAAAAGGGGQQQQQQQQQCCCCCCGGGGNNNNNNNNQQQQQQQQQIIIIIIIIGGGGSSSSSSKKKKKKKKKFFFFFFFFFFFWWWWWWWWWWWWWWEEEEEEEEEVVVVVVVIIIIIIIISSSSSSDDDDDDDDEEEEEEEEEHHHHHHHHHHGGGGIIIIIIIIDDDDDDDDPPPPPPPSSSSSSGGGGQQQQQQQQQYYYYYYYYYYYYVVVVVVVGGGGDDDDDDDDSSSSSSDDDDDDDDLLLLLLLLQQQQQQQQQLLLLLLLLEEEEEEEEERRRRRRRRRRRIIIIIIIINNNNNNNNVVVVVVVYYYYYYYYYYYYYYYYYYYYYYYYNNNNNNNNEEEEEEEEEAAAAAGGGGSSSSSSNNNNNNNNKKKKKKKKKYYYYYYYYYYYYVVVVVVVPPPPPPPRRRRRRRRRRRAAAAAVVVVVVVLLLLLLLLVVVVVVVDDDDDDDDLLLLLLLLEEEEEEEEEPPPPPPPGGGGTTTTTTTMMMMMMMMDDDDDDDDSSSSSSVVVVVVVRRRRRRRRRRRSSSSSSGGGGPPPPPPPFFFFFFFFFFFGGGGQQQQQQQQQLLLLLLLLFFFFFFFFFFFRRRRRRRRRRRPPPPPPPDDDDDDDDNNNNNNNNYYYYYYYYYYYYVVVVVVVFFFFFFFFFFFGGGGQQQQQQQQQSSSSSSGGGGAAAAAGGGGNNNNNNNNNNNNNNNNWWWWWWWWWWWWWWAAAAAKKKKKKKKKGGGGHHHHHHHHHHYYYYYYYYYYYYTTTTTTTEEEEEEEEEGGGGAAAAAEEEEEEEEELLLLLLLLVVVVVVVDDDDDDDDNNNNNNNNVVVVVVVLLLLLLLLDDDDDDDDVVVVVVVVVVVVVVRRRRRRRRRRRKKKKKKKKKEEEEEEEEEAAAAAEEEEEEEEESSSSSSTTTTTTTDDDDDDDDCCCCCCLLLLLLLLQQQQQQQQQGGGGFFFFFFFFFFFQQQQQQQQQLLLLLLLLTTTTTTTHHHHHHHHHHSSSSSSLLLLLLLLGGGGGGGGGGGGTTTTTTTGGGGSSSSSSGGGGMMMMMMMMGGGGTTTTTTTLLLLLLLLLLLLLLLLIIIIIIIISSSSSSKKKKKKKKKIIIIIIIIRRRRRRRRRRREEEEEEEEEEEEEEEEEEYYYYYYYYYYYYPPPPPPPDDDDDDDDRRRRRRRRRRRIIIIIIIIMMMMMMMMNNNNNNNNTTTTTTTFFFFFFFFFFFSSSSSSVVVVVVVVVVVVVVPPPPPPPSSSSSSPPPPPPPKKKKKKKKKVVVVVVVSSSSSSDDDDDDDDTTTTTTTVVVVVVVVVVVVVVEEEEEEEEEPPPPPPPYYYYYYYYYYYYNNNNNNNNAAAAATTTTTTTLLLLLLLLSSSSSSVVVVVVVHHHHHHHHHHQQQQQQQQQLLLLLLLLVVVVVVVEEEEEEEEENNNNNNNNTTTTTTTDDDDDDDDSSSSSSTTTTTTTFFFFFFFFFFFCCCCCCIIIIIIIIDDDDDDDDNNNNNNNNEEEEEEEEEAAAAALLLLLLLLYYYYYYYYYYYYDDDDDDDDIIIIIIIICCCCCCFFFFFFFFFFFRRRRRRRRRRRTTTTTTTLLLLLLLLKKKKKKKKKLLLLLLLLTTTTTTTTTTTTTTPPPPPPPTTTTTTTYYYYYYYYYYYYGGGGDDDDDDDDLLLLLLLLNNNNNNNNHHHHHHHHHHLLLLLLLLVVVVVVVSSSSSSAAAAATTTTTTTMMMMMMMMSSSSSSGGGGVVVVVVVTTTTTTTTTTTTTTCCCCCCLLLLLLLLRRRRRRRRRRRFFFFFFFFFFFPPPPPPPGGGGQQQQQQQQQLLLLLLLLNNNNNNNNAAAAADDDDDDDDLLLLLLLLRRRRRRRRRRRKKKKKKKKKLLLLLLLLAAAAAVVVVVVVNNNNNNNNMMMMMMMMVVVVVVVPPPPPPPFFFFFFFFFFFPPPPPPPRRRRRRRRRRRLLLLLLLLHHHHHHHHHHFFFFFFFFFFFFFFFFFFFFFFMMMMMMMMPPPPPPPGGGGFFFFFFFFFFFAAAAAPPPPPPPLLLLLLLLTTTTTTTSSSSSSRRRRRRRRRRRSSSSSSNNNNNNNNQQQQQQQQQQQQQQQQQQYYYYYYYYYYYYRRRRRRRRRRRAAAAAIIIIIIIITTTTTTTVVVVVVVPPPPPPPEEEEEEEEELLLLLLLLTTTTTTTQQQQQQQQQQQQQQQQQQCCCCCCFFFFFFFFFFFDDDDDDDDAAAAAKKKKKKKKKNNNNNNNNMMMMMMMMMMMMMMMMAAAAAAAAAACCCCCCDDDDDDDDPPPPPPPRRRRRRRRRRRHHHHHHHHHHGGGGRRRRRRRRRRRYYYYYYYYYYYYLLLLLLLLTTTTTTTAAAAAAAAAAAAAAAIIIIIIIIFFFFFFFFFFFRRRRRRRRRRRGGGGRRRRRRRRRRRMMMMMMMMSSSSSSMMMMMMMMKKKKKKKKKEEEEEEEEEVVVVVVVDDDDDDDDEEEEEEEEEQQQQQQQQQMMMMMMMMLLLLLLLLNNNNNNNNIIIIIIIIQQQQQQQQQNNNNNNNNKKKKKKKKKNNNNNNNNSSSSSSSSSSSSYYYYYYYYYYYYFFFFFFFFFFFVVVVVVVDDDDDDDDWWWWWWWWWWWWWWIIIIIIIIPPPPPPPNNNNNNNNNNNNNNNNVVVVVVVKKKKKKKKKTTTTTTTAAAAAVVVVVVVCCCCCCDDDDDDDDIIIIIIIIPPPPPPPPPPPPPPRRRRRRRRRRRGGGGLLLLLLLLKKKKKKKKKMMMMMMMMSSSSSSAAAAATTTTTTTFFFFFFFFFFFIIIIIIIIGGGGNNNNNNNNSSSSSSTTTTTTTAAAAAIIIIIIIIQQQQQQQQQEEEEEEEEELLLLLLLLFFFFFFFFFFFKKKKKKKKKRRRRRRRRRRRIIIIIIIISSSSSSEEEEEEEEEQQQQQQQQQFFFFFFFFFFFTTTTTTTAAAAAMMMMMMMMFFFFFFFFFFFRRRRRRRRRRRRRRRRRRRRRRKKKKKKKKKAAAAAFFFFFFFFFFFLLLLLLLLHHHHHHHHHHWWWWWWWWWWWWWWYYYYYYYYYYYYTTTTTTTGGGGEEEEEEEEEGGGGMMMMMMMMDDDDDDDDEEEEEEEEEMMMMMMMMEEEEEEEEEFFFFFFFFFFFTTTTTTTEEEEEEEEEAAAAAEEEEEEEEESSSSSSNNNNNNNNMMMMMMMMNNNNNNNNDDDDDDDDLLLLLLLLVVVVVVVSSSSSSEEEEEEEEEYYYYYYYYYYYYQQQQQQQQQQQQQQQQQQYYYYYYYYYYYYQQQQQQQQQEEEEEEEEEAAAAAAAAAAAAAAADDDDDDDDEEEEEEEEEDDDDDDDDAAAAAAAAAAEEEEEEEEEAAAAAFFFFFFFFFFFDDDDDDDDGGGGEEEEEEEEEE

SEQ ID NO: 195 - protein, 3486 aa, Gallus gallus
MMMMMMMMRRRRRRRRRRREEEEEEEEEIIIIIIIIVVVVVVVHHHHHHHHHHIIIIIIIIQQQQQQQQQAAAAAGGGGQQQQQQQQQCCCCCCGGGGNNNNNNNNQQQQQQQQQIIIIIIIIGGGGAAAAAKKKKKKKKKFFFFFFFFFFFWWWWWWWWWWWWWWEEEEEEEEEVVVVVVVIIIIIIIISSSSSSDDDDDDDDEEEEEEEEEHHHHHHHHHHGGGGIIIIIIIIDDDDDDDDPPPPPPPTTTTTTTGGGGTTTTTTTYYYYYYYYYYYYHHHHHHHHHHGGGGDDDDDDDDSSSSSSDDDDDDDDLLLLLLLLQQQQQQQQQLLLLLLLLDDDDDDDDRRRRRRRRRRRIIIIIIIISSSSSSVVVVVVVYYYYYYYYYYYYYYYYYYYYYYYYNNNNNNNNEEEEEEEEEAAAAATTTTTTTGGGGGGGGKKKKKKKKKYYYYYYYYYYYYVVVVVVVPPPPPPPRRRRRRRRRRRAAAAAIIIIIIIILLLLLLLLVVVVVVVDDDDDDDDLLLLLLLLEEEEEEEEEPPPPPPPGGGGTTTTTTTMMMMMMMMDDDDDDDDSSSSSSVVVVVVVRRRRRRRRRRRSSSSSSGGGGPPPPPPPFFFFFFFFFFFGGGGQQQQQQQQQIIIIIIIIFFFFFFFFFFFRRRRRRRRRRRPPPPPPPDDDDDDDDNNNNNNNNFFFFFFFFFFFVVVVVVVFFFFFFFFFFFGGGGQQQQQQQQQSSSSSSGGGGAAAAAGGGGNNNNNNNNNNNNNNNNWWWWWWWWWWWWWWAAAAAKKKKKKKKKGGGGHHHHHHHHHHYYYYYYYYYYYYTTTTTTTEEEEEEEEEGGGGAAAAAEEEEEEEEELLLLLLLLVVVVVVVDDDDDDDDSSSSSSVVVVVVVLLLLLLLLDDDDDDDDVVVVVVVVVVVVVVRRRRRRRRRRRKKKKKKKKKEEEEEEEEEAAAAAEEEEEEEEESSSSSSCCCCCCDDDDDDDDCCCCCCLLLLLLLLQQQQQQQQQGGGGFFFFFFFFFFFQQQQQQQQQLLLLLLLLTTTTTTTHHHHHHHHHHSSSSSSLLLLLLLLGGGGGGGGGGGGTTTTTTTGGGGSSSSSSGGGGMMMMMMMMGGGGTTTTTTTLLLLLLLLLLLLLLLLIIIIIIIISSSSSSKKKKKKKKKIIIIIIIIRRRRRRRRRRREEEEEEEEEEEEEEEEEEYYYYYYYYYYYYPPPPPPPDDDDDDDDRRRRRRRRRRRIIIIIIIIMMMMMMMMNNNNNNNNTTTTTTTFFFFFFFFFFFSSSSSSVVVVVVVVVVVVVVPPPPPPPSSSSSSPPPPPPPKKKKKKKKKVVVVVVVSSSSSSDDDDDDDDTTTTTTTVVVVVVVVVVVVVVEEEEEEEEEPPPPPPPYYYYYYYYYYYYNNNNNNNNAAAAATTTTTTTLLLLLLLLSSSSSSVVVVVVVHHHHHHHHHHQQQQQQQQQLLLLLLLLVVVVVVVEEEEEEEEENNNNNNNNTTTTTTTDDDDDDDDEEEEEEEEETTTTTTTYYYYYYYYYYYYCCCCCCIIIIIIIIDDDDDDDDNNNNNNNNEEEEEEEEEAAAAALLLLLLLLYYYYYYYYYYYYDDDDDDDDIIIIIIIICCCCCCFFFFFFFFFFFRRRRRRRRRRRTTTTTTTLLLLLLLLKKKKKKKKKLLLLLLLLTTTTTTTTTTTTTTPPPPPPPTTTTTTTYYYYYYYYYYYYGGGGDDDDDDDDLLLLLLLLNNNNNNNNHHHHHHHHHHLLLLLLLLVVVVVVVSSSSSSAAAAATTTTTTTMMMMMMMMSSSSSSGGGGVVVVVVVTTTTTTTTTTTTTTCCCCCCLLLLLLLLRRRRRRRRRRRFFFFFFFFFFFPPPPPPPGGGGQQQQQQQQQLLLLLLLLNNNNNNNNAAAAADDDDDDDDLLLLLLLLRRRRRRRRRRRKKKKKKKKKLLLLLLLLAAAAAVVVVVVVNNNNNNNNMMMMMMMMVVVVVVVPPPPPPPFFFFFFFFFFFPPPPPPPRRRRRRRRRRRLLLLLLLLHHHHHHHHHHFFFFFFFFFFFFFFFFFFFFFFMMMMMMMMPPPPPPPGGGGFFFFFFFFFFFAAAAAPPPPPPPLLLLLLLLTTTTTTTSSSSSSRRRRRRRRRRRGGGGSSSSSSQQQQQQQQQQQQQQQQQQYYYYYYYYYYYYRRRRRRRRRRRAAAAALLLLLLLLTTTTTTTVVVVVVVPPPPPPPEEEEEEEEELLLLLLLLTTTTTTTQQQQQQQQQQQQQQQQQQVVVVVVVFFFFFFFFFFFDDDDDDDDAAAAAKKKKKKKKKNNNNNNNNMMMMMMMMMMMMMMMMAAAAAAAAAACCCCCCDDDDDDDDPPPPPPPRRRRRRRRRRRHHHHHHHHHHGGGGRRRRRRRRRRRYYYYYYYYYYYYLLLLLLLLTTTTTTTVVVVVVVAAAAAAAAAAVVVVVVVFFFFFFFFFFFRRRRRRRRRRRGGGGRRRRRRRRRRRMMMMMMMMSSSSSSMMMMMMMMKKKKKKKKKEEEEEEEEEVVVVVVVDDDDDDDDEEEEEEEEEQQQQQQQQQMMMMMMMMLLLLLLLLNNNNNNNNVVVVVVVQQQQQQQQQNNNNNNNNKKKKKKKKKNNNNNNNNSSSSSSSSSSSSYYYYYYYYYYYYFFFFFFFFFFFVVVVVVVEEEEEEEEEWWWWWWWWWWWWWWIIIIIIIIPPPPPPPNNNNNNNNNNNNNNNNVVVVVVVKKKKKKKKKTTTTTTTAAAAAVVVVVVVCCCCCCDDDDDDDDIIIIIIIIPPPPPPPPPPPPPPRRRRRRRRRRRGGGGLLLLLLLLKKKKKKKKKMMMMMMMMAAAAAVVVVVVVTTTTTTTFFFFFFFFFFFIIIIIIIIGGGGNNNNNNNNSSSSSSTTTTTTTAAAAAIIIIIIIIQQQQQQQQQEEEEEEEEELLLLLLLLFFFFFFFFFFFKKKKKKKKKRRRRRRRRRRRIIIIIIIISSSSSSEEEEEEEEEQQQQQQQQQFFFFFFFFFFFTTTTTTTAAAAAMMMMMMMMFFFFFFFFFFFRRRRRRRRRRRRRRRRRRRRRRKKKKKKKKKAAAAAFFFFFFFFFFFLLLLLLLLHHHHHHHHHHWWWWWWWWWWWWWWYYYYYYYYYYYYTTTTTTTGGGGEEEEEEEEEGGGGMMMMMMMMDDDDDDDDEEEEEEEEEMMMMMMMMEEEEEEEEEFFFFFFFFFFFTTTTTTTEEEEEEEEEAAAAAEEEEEEEEESSSSSSNNNNNNNNMMMMMMMMNNNNNNNNDDDDDDDDLLLLLLLLVVVVVVVSSSSSSEEEEEEEEEYYYYYYYYYYYYQQQQQQQQQQQQQQQQQQYYYYYYYYYYYYQQQQQQQQQDDDDDDDDAAAAATTTTTTTAAAAAEEEEEEEEEEEEEEEEEEEEEEEEEEEEEEEEEEEEDDDDDDDDFFFFFFFFFFFGGGGEEEEEEEEEEEEEEEEEEAAAAAEEEEEEEEEEEEEEEEEEEEEEEEEEEAAAAAA

SEQ ID NO: 196 - protein, 3507 aa, Zea mays
MMMMMMMMRRRRRRRRRRREEEEEEEEEIIIIIIIILLLLLLLLHHHHHHHHHHIIIIIIIIQQQQQQQQQGGGGGGGGQQQQQQQQQCCCCCCGGGGNNNNNNNNQQQQQQQQQIIIIIIIIGGGGAAAAAKKKKKKKKKFFFFFFFFFFFWWWWWWWWWWWWWWEEEEEEEEEVVVVVVVIIIIIIIICCCCCCDDDDDDDDEEEEEEEEEHHHHHHHHHHGGGGIIIIIIIIDDDDDDDDHHHHHHHHHHTTTTTTTGGGGKKKKKKKKKYYYYYYYYYYYYAAAAAGGGGDDDDDDDDSSSSSSDDDDDDDDLLLLLLLLQQQQQQQQQLLLLLLLLEEEEEEEEERRRRRRRRRRRIIIIIIIINNNNNNNNVVVVVVVYYYYYYYYYYYYYYYYYYYYYYYYNNNNNNNNEEEEEEEEEAAAAASSSSSSGGGGGGGGRRRRRRRRRRRFFFFFFFFFFFVVVVVVVPPPPPPPRRRRRRRRRRRAAAAAVVVVVVVLLLLLLLLMMMMMMMMDDDDDDDDLLLLLLLLEEEEEEEEEPPPPPPPGGGGTTTTTTTMMMMMMMMDDDDDDDDSSSSSSVVVVVVVRRRRRRRRRRRSSSSSSGGGGPPPPPPPFFFFFFFFFFFGGGGQQQQQQQQQIIIIIIIIFFFFFFFFFFFRRRRRRRRRRRPPPPPPPDDDDDDDDNNNNNNNNFFFFFFFFFFFVVVVVVVFFFFFFFFFFFGGGGQQQQQQQQQSSSSSSGGGGAAAAAGGGGNNNNNNNNNNNNNNNNWWWWWWWWWWWWWWAAAAAKKKKKKKKKGGGGHHHHHHHHHHYYYYYYYYYYYYTTTTTTTEEEEEEEEEGGGGAAAAAEEEEEEEEELLLLLLLLIIIIIIIIDDDDDDDDSSSSSSVVVVVVVLLLLLLLLDDDDDDDDVVVVVVVVVVVVVVRRRRRRRRRRRKKKKKKKKKEEEEEEEEEAAAAAEEEEEEEEENNNNNNNNCCCCCCDDDDDDDDCCCCCCLLLLLLLLQQQQQQQQQGGGGFFFFFFFFFFFQQQQQQQQQVVVVVVVCCCCCCHHHHHHHHHHSSSSSSLLLLLLLLGGGGGGGGGGGGTTTTTTTGGGGSSSSSSGGGGMMMMMMMMGGGGTTTTTTTLLLLLLLLLLLLLLLLIIIIIIIISSSSSSKKKKKKKKKIIIIIIIIRRRRRRRRRRREEEEEEEEEEEEEEEEEEYYYYYYYYYYYYPPPPPPPDDDDDDDDRRRRRRRRRRRMMMMMMMMMMMMMMMMLLLLLLLLTTTTTTTFFFFFFFFFFFSSSSSSVVVVVVVFFFFFFFFFFFPPPPPPPSSSSSSPPPPPPPKKKKKKKKKVVVVVVVSSSSSSDDDDDDDDTTTTTTTVVVVVVVVVVVVVVEEEEEEEEEPPPPPPPYYYYYYYYYYYYNNNNNNNNAAAAATTTTTTTLLLLLLLLSSSSSSVVVVVVVHHHHHHHHHHQQQQQQQQQLLLLLLLLVVVVVVVEEEEEEEEENNNNNNNNAAAAADDDDDDDDEEEEEEEEECCCCCCMMMMMMMMVVVVVVVLLLLLLLLDDDDDDDDNNNNNNNNEEEEEEEEEAAAAALLLLLLLLYYYYYYYYYYYYDDDDDDDDIIIIIIIICCCCCCFFFFFFFFFFFRRRRRRRRRRRTTTTTTTLLLLLLLLKKKKKKKKKLLLLLLLLAAAAATTTTTTTPPPPPPPTTTTTTTFFFFFFFFFFFGGGGDDDDDDDDLLLLLLLLNNNNNNNNHHHHHHHHHHLLLLLLLLIIIIIIIISSSSSSAAAAATTTTTTTMMMMMMMMSSSSSSGGGGVVVVVVVTTTTTTTCCCCCCCCCCCCLLLLLLLLRRRRRRRRRRRFFFFFFFFFFFPPPPPPPGGGGQQQQQQQQQLLLLLLLLNNNNNNNNSSSSSSDDDDDDDDLLLLLLLLRRRRRRRRRRRKKKKKKKKKLLLLLLLLAAAAAVVVVVVVNNNNNNNNLLLLLLLLIIIIIIIIPPPPPPPFFFFFFFFFFFPPPPPPPRRRRRRRRRRRLLLLLLLLHHHHHHHHHHFFFFFFFFFFFFFFFFFFFFFFMMMMMMMMVVVVVVVGGGGFFFFFFFFFFFAAAAAPPPPPPPLLLLLLLLTTTTTTTSSSSSSRRRRRRRRRRRGGGGSSSSSSQQQQQQQQQQQQQQQQQQYYYYYYYYYYYYRRRRRRRRRRRAAAAALLLLLLLLTTTTTTTVVVVVVVPPPPPPPEEEEEEEEELLLLLLLLTTTTTTTQQQQQQQQQQQQQQQQQQMMMMMMMMWWWWWWWWWWWWWWDDDDDDDDSSSSSSKKKKKKKKKNNNNNNNNMMMMMMMMMMMMMMMMCCCCCCAAAAAAAAAADDDDDDDDPPPPPPPRRRRRRRRRRRHHHHHHHHHHGGGGRRRRRRRRRRRYYYYYYYYYYYYLLLLLLLLTTTTTTTAAAAASSSSSSAAAAAMMMMMMMMFFFFFFFFFFFRRRRRRRRRRRGGGGKKKKKKKKKMMMMMMMMSSSSSSTTTTTTTKKKKKKKKKEEEEEEEEEVVVVVVVDDDDDDDDEEEEEEEEEQQQQQQQQQMMMMMMMMLLLLLLLLNNNNNNNNVVVVVVVQQQQQQQQQNNNNNNNNKKKKKKKKKNNNNNNNNSSSSSSSSSSSSYYYYYYYYYYYYFFFFFFFFFFFVVVVVVVEEEEEEEEEWWWWWWWWWWWWWWIIIIIIIIPPPPPPPNNNNNNNNNNNNNNNNVVVVVVVKKKKKKKKKSSSSSSSSSSSSVVVVVVVCCCCCCDDDDDDDDIIIIIIIIPPPPPPPPPPPPPPIIIIIIIIGGGGLLLLLLLLKKKKKKKKKMMMMMMMMSSSSSSSSSSSSTTTTTTTFFFFFFFFFFFVVVVVVVGGGGNNNNNNNNSSSSSSTTTTTTTSSSSSSIIIIIIIIQQQQQQQQQEEEEEEEEEMMMMMMMMFFFFFFFFFFFRRRRRRRRRRRRRRRRRRRRRRVVVVVVVSSSSSSEEEEEEEEEQQQQQQQQQFFFFFFFFFFFTTTTTTTAAAAAMMMMMMMMFFFFFFFFFFFRRRRRRRRRRRRRRRRRRRRRRKKKKKKKKKAAAAAFFFFFFFFFFFLLLLLLLLHHHHHHHHHHWWWWWWWWWWWWWWYYYYYYYYYYYYTTTTTTTGGGGEEEEEEEEEGGGGMMMMMMMMDDDDDDDDEEEEEEEEEMMMMMMMMEEEEEEEEEFFFFFFFFFFFTTTTTTTEEEEEEEEEAAAAAEEEEEEEEESSSSSSNNNNNNNNMMMMMMMMNNNNNNNNDDDDDDDDLLLLLLLLVVVVVVVAAAAAEEEEEEEEEYYYYYYYYYYYYQQQQQQQQQQQQQQQQQQYYYYYYYYYYYYQQQQQQQQQDDDDDDDDAAAAATTTTTTTAAAAAEEEEEEEEEDDDDDDDDEEEEEEEEEEEEEEEEEEYYYYYYYYYYYYEEEEEEEEEEEEEEEEEEEEEEEEEEEEEEEEEEEEEEEEEEEEEEEEEEEEEEEEEEEEEEEEEEEEEEEEEEEEEEEEETTTTTTTT

SEQ ID NO: 197 - protein, 3544 aa, Arabidopsis thaliana
MMMMMMMMRRRRRRRRRRREEEEEEEEEIIIIIIIILLLLLLLLHHHHHHHHHHIIIIIIIIQQQQQQQQQGGGGGGGGQQQQQQQQQCCCCCCGGGGNNNNNNNNQQQQQQQQQIIIIIIIIGGGGAAAAAKKKKKKKKKFFFFFFFFFFFWWWWWWWWWWWWWWEEEEEEEEEVVVVVVVVVVVVVVCCCCCCAAAAAEEEEEEEEEHHHHHHHHHHGGGGIIIIIIIIDDDDDDDDSSSSSSTTTTTTTGGGGRRRRRRRRRRRYYYYYYYYYYYYQQQQQQQQQGGGGEEEEEEEEENNNNNNNNDDDDDDDDLLLLLLLLQQQQQQQQQLLLLLLLLEEEEEEEEERRRRRRRRRRRVVVVVVVNNNNNNNNVVVVVVVYYYYYYYYYYYYYYYYYYYYYYYYNNNNNNNNEEEEEEEEEAAAAASSSSSSCCCCCCGGGGRRRRRRRRRRRFFFFFFFFFFFVVVVVVVPPPPPPPRRRRRRRRRRRAAAAAVVVVVVVLLLLLLLLMMMMMMMMDDDDDDDDLLLLLLLLEEEEEEEEEPPPPPPPGGGGTTTTTTTMMMMMMMMDDDDDDDDSSSSSSVVVVVVVRRRRRRRRRRRSSSSSSGGGGPPPPPPPYYYYYYYYYYYYGGGGQQQQQQQQQIIIIIIIIFFFFFFFFFFFRRRRRRRRRRRPPPPPPPDDDDDDDDNNNNNNNNFFFFFFFFFFFVVVVVVVFFFFFFFFFFFGGGGQQQQQQQQQSSSSSSGGGGAAAAAGGGGNNNNNNNNNNNNNNNNWWWWWWWWWWWWWWAAAAAKKKKKKKKKGGGGHHHHHHHHHHYYYYYYYYYYYYTTTTTTTEEEEEEEEEGGGGAAAAAEEEEEEEEELLLLLLLLIIIIIIIIDDDDDDDDSSSSSSVVVVVVVLLLLLLLLDDDDDDDDVVVVVVVVVVVVVVRRRRRRRRRRRKKKKKKKKKEEEEEEEEERRRRRRRRRRREEEEEEEEENNNNNNNNCCCCCCDDDDDDDDCCCCCCLLLLLLLLQQQQQQQQQGGGGFFFFFFFFFFFQQQQQQQQQVVVVVVVCCCCCCHHHHHHHHHHSSSSSSLLLLLLLLGGGGGGGGGGGGTTTTTTTGGGGSSSSSSGGGGMMMMMMMMGGGGTTTTTTTLLLLLLLLLLLLLLLLIIIIIIIISSSSSSKKKKKKKKKIIIIIIIIRRRRRRRRRRREEEEEEEEEEEEEEEEEEYYYYYYYYYYYYPPPPPPPDDDDDDDDRRRRRRRRRRRMMMMMMMMIIIIIIIIVVVVVVVTTTTTTTFFFFFFFFFFFSSSSSSVVVVVVVIIIIIIIIPPPPPPPSSSSSSPPPPPPPKKKKKKKKKVVVVVVVSSSSSSDDDDDDDDTTTTTTTVVVVVVVVVVVVVVEEEEEEEEEPPPPPPPYYYYYYYYYYYYNNNNNNNNAAAAATTTTTTTLLLLLLLLSSSSSSVVVVVVVHHHHHHHHHHQQQQQQQQQLLLLLLLLVVVVVVVEEEEEEEEENNNNNNNNAAAAADDDDDDDDEEEEEEEEECCCCCCMMMMMMMMVVVVVVVLLLLLLLLDDDDDDDDNNNNNNNNEEEEEEEEEAAAAALLLLLLLLYYYYYYYYYYYYDDDDDDDDIIIIIIIICCCCCCFFFFFFFFFFFRRRRRRRRRRRTTTTTTTLLLLLLLLKKKKKKKKKLLLLLLLLTTTTTTTTTTTTTTPPPPPPPSSSSSSFFFFFFFFFFFGGGGDDDDDDDDLLLLLLLLNNNNNNNNHHHHHHHHHHLLLLLLLLIIIIIIIISSSSSSAAAAATTTTTTTMMMMMMMMSSSSSSGGGGVVVVVVVTTTTTTTCCCCCCCCCCCCLLLLLLLLRRRRRRRRRRRFFFFFFFFFFFPPPPPPPGGGGQQQQQQQQQLLLLLLLLNNNNNNNNSSSSSSDDDDDDDDLLLLLLLLRRRRRRRRRRRKKKKKKKKKLLLLLLLLAAAAAVVVVVVVNNNNNNNNLLLLLLLLIIIIIIIIPPPPPPPFFFFFFFFFFFPPPPPPPRRRRRRRRRRRLLLLLLLLHHHHHHHHHHFFFFFFFFFFFFFFFFFFFFFFMMMMMMMMVVVVVVVGGGGFFFFFFFFFFFAAAAAPPPPPPPLLLLLLLLTTTTTTTSSSSSSRRRRRRRRRRRGGGGSSSSSSQQQQQQQQQQQQQQQQQQYYYYYYYYYYYYRRRRRRRRRRRAAAAALLLLLLLLTTTTTTTVVVVVVVPPPPPPPEEEEEEEEELLLLLLLLTTTTTTTQQQQQQQQQQQQQQQQQQMMMMMMMMWWWWWWWWWWWWWWDDDDDDDDAAAAAKKKKKKKKKNNNNNNNNMMMMMMMMMMMMMMMMCCCCCCAAAAAAAAAADDDDDDDDPPPPPPPRRRRRRRRRRRHHHHHHHHHHGGGGRRRRRRRRRRRYYYYYYYYYYYYLLLLLLLLTTTTTTTAAAAASSSSSSAAAAAMMMMMMMMFFFFFFFFFFFRRRRRRRRRRRGGGGKKKKKKKKKMMMMMMMMSSSSSSTTTTTTTKKKKKKKKKEEEEEEEEEVVVVVVVDDDDDDDDEEEEEEEEEQQQQQQQQQMMMMMMMMIIIIIIIINNNNNNNNVVVVVVVQQQQQQQQQNNNNNNNNKKKKKKKKKNNNNNNNNSSSSSSSSSSSSYYYYYYYYYYYYFFFFFFFFFFFVVVVVVVEEEEEEEEEWWWWWWWWWWWWWWIIIIIIIIPPPPPPPNNNNNNNNNNNNNNNNVVVVVVVKKKKKKKKKSSSSSSTTTTTTTVVVVVVVCCCCCCDDDDDDDDIIIIIIIIPPPPPPPPPPPPPPTTTTTTTGGGGLLLLLLLLKKKKKKKKKMMMMMMMMAAAAASSSSSSTTTTTTTFFFFFFFFFFFIIIIIIIIGGGGNNNNNNNNSSSSSSTTTTTTTSSSSSSIIIIIIIIQQQQQQQQQEEEEEEEEEMMMMMMMMFFFFFFFFFFFRRRRRRRRRRRRRRRRRRRRRRVVVVVVVSSSSSSEEEEEEEEEQQQQQQQQQFFFFFFFFFFFTTTTTTTAAAAAMMMMMMMMFFFFFFFFFFFRRRRRRRRRRRRRRRRRRRRRRKKKKKKKKKAAAAAFFFFFFFFFFFLLLLLLLLHHHHHHHHHHWWWWWWWWWWWWWWYYYYYYYYYYYYTTTTTTTGGGGEEEEEEEEEGGGGMMMMMMMMDDDDDDDDEEEEEEEEEMMMMMMMMEEEEEEEEEFFFFFFFFFFFTTTTTTTEEEEEEEEEAAAAAEEEEEEEEESSSSSSNNNNNNNNMMMMMMMMNNNNNNNNDDDDDDDDLLLLLLLLVVVVVVVSSSSSSEEEEEEEEEYYYYYYYYYYYYQQQQQQQQQQQQQQQQQQYYYYYYYYYYYYQQQQQQQQQDDDDDDDDAAAAATTTTTTTAAAAADDDDDDDDEEEEEEEEEEEEEEEEEEEEEEEEEEEGGGGYYYYYYYYYYYYEEEEEEEEEYYYYYYYYYYYYEEEEEEEEEEEEEEEEEEDDDDDDDDEEEEEEEEEVVVVVVVEEEEEEEEEVVVVVVVQQQQQQQQQEEEEEEEEEEEEEEEEEEQQQQQQQQQQ

SEQ ID NO: 198 - protein, 3495 aa, Zea mays
MMMMMMMMRRRRRRRRRRREEEEEEEEEIIIIIIIILLLLLLLLHHHHHHHHHHIIIIIIIIQQQQQQQQQGGGGGGGGQQQQQQQQQCCCCCCGGGGNNNNNNNNQQQQQQQQQIIIIIIIIGGGGSSSSSSKKKKKKKKKFFFFFFFFFFFWWWWWWWWWWWWWWEEEEEEEEEVVVVVVVVVVVVVVCCCCCCDDDDDDDDEEEEEEEEEHHHHHHHHHHGGGGIIIIIIIIDDDDDDDDPPPPPPPTTTTTTTGGGGRRRRRRRRRRRYYYYYYYYYYYYVVVVVVVGGGGTTTTTTTSSSSSSDDDDDDDDLLLLLLLLQQQQQQQQQLLLLLLLLEEEEEEEEERRRRRRRRRRRVVVVVVVNNNNNNNNVVVVVVVYYYYYYYYYYYYYYYYYYYYYYYYNNNNNNNNEEEEEEEEEAAAAASSSSSSCCCCCCGGGGRRRRRRRRRRRFFFFFFFFFFFVVVVVVVPPPPPPPGGGGAAAAAVVVVVVVLLLLLLLLMMMMMMMMDDDDDDDDLLLLLLLLEEEEEEEEEPPPPPPPGGGGTTTTTTTMMMMMMMMDDDDDDDDSSSSSSVVVVVVVRRRRRRRRRRRTTTTTTTGGGGPPPPPPPYYYYYYYYYYYYGGGGQQQQQQQQQIIIIIIIIFFFFFFFFFFFRRRRRRRRRRRPPPPPPPDDDDDDDDNNNNNNNNFFFFFFFFFFFVVVVVVVFFFFFFFFFFFGGGGQQQQQQQQQSSSSSSGGGGAAAAAGGGGNNNNNNNNNNNNNNNNWWWWWWWWWWWWWWAAAAAKKKKKKKKKGGGGHHHHHHHHHHYYYYYYYYYYYYTTTTTTTEEEEEEEEEGGGGAAAAAEEEEEEEEELLLLLLLLIIIIIIIIDDDDDDDDSSSSSSVVVVVVVLLLLLLLLDDDDDDDDVVVVVVVVVVVVVVRRRRRRRRRRRKKKKKKKKKEEEEEEEEEAAAAAEEEEEEEEENNNNNNNNCCCCCCDDDDDDDDCCCCCCLLLLLLLLQQQQQQQQQGGGGFFFFFFFFFFFQQQQQQQQQVVVVVVVCCCCCCHHHHHHHHHHSSSSSSLLLLLLLLGGGGGGGGGGGGTTTTTTTGGGGSSSSSSGGGGMMMMMMMMGGGGTTTTTTTLLLLLLLLLLLLLLLLIIIIIIIISSSSSSKKKKKKKKKIIIIIIIIRRRRRRRRRRREEEEEEEEEEEEEEEEEEYYYYYYYYYYYYPPPPPPPDDDDDDDDRRRRRRRRRRRMMMMMMMMMMMMMMMMLLLLLLLLTTTTTTTFFFFFFFFFFFSSSSSSVVVVVVVFFFFFFFFFFFPPPPPPPSSSSSSPPPPPPPKKKKKKKKKVVVVVVVSSSSSSDDDDDDDDTTTTTTTVVVVVVVVVVVVVVEEEEEEEEEPPPPPPPYYYYYYYYYYYYNNNNNNNNAAAAATTTTTTTLLLLLLLLSSSSSSVVVVVVVHHHHHHHHHHQQQQQQQQQLLLLLLLLVVVVVVVEEEEEEEEENNNNNNNNAAAAADDDDDDDDEEEEEEEEECCCCCCMMMMMMMMVVVVVVVLLLLLLLLDDDDDDDDNNNNNNNNEEEEEEEEEAAAAALLLLLLLLYYYYYYYYYYYYDDDDDDDDIIIIIIIICCCCCCFFFFFFFFFFFRRRRRRRRRRRTTTTTTTLLLLLLLLKKKKKKKKKLLLLLLLLTTTTTTTTTTTTTTPPPPPPPSSSSSSFFFFFFFFFFFGGGGDDDDDDDDLLLLLLLLNNNNNNNNHHHHHHHHHHLLLLLLLLIIIIIIIISSSSSSAAAAATTTTTTTMMMMMMMMSSSSSSGGGGVVVVVVVTTTTTTTCCCCCCCCCCCCLLLLLLLLRRRRRRRRRRRFFFFFFFFFFFPPPPPPPGGGGQQQQQQQQQLLLLLLLLNNNNNNNNSSSSSSDDDDDDDDLLLLLLLLRRRRRRRRRRRKKKKKKKKKLLLLLLLLAAAAAVVVVVVVNNNNNNNNLLLLLLLLIIIIIIIIPPPPPPPFFFFFFFFFFFPPPPPPPRRRRRRRRRRRLLLLLLLLHHHHHHHHHHFFFFFFFFFFFFFFFFFFFFFFMMMMMMMMVVVVVVVGGGGFFFFFFFFFFFAAAAAPPPPPPPLLLLLLLLTTTTTTTSSSSSSRRRRRRRRRRRGGGGSSSSSSQQQQQQQQQQQQQQQQQQYYYYYYYYYYYYRRRRRRRRRRRAAAAALLLLLLLLTTTTTTTVVVVVVVPPPPPPPEEEEEEEEELLLLLLLLTTTTTTTQQQQQQQQQQQQQQQQQQMMMMMMMMWWWWWWWWWWWWWWDDDDDDDDAAAAAKKKKKKKKKNNNNNNNNMMMMMMMMMMMMMMMMCCCCCCAAAAAAAAAADDDDDDDDPPPPPPPRRRRRRRRRRRHHHHHHHHHHGGGGRRRRRRRRRRRYYYYYYYYYYYYLLLLLLLLTTTTTTTAAAAASSSSSSAAAAAMMMMMMMMFFFFFFFFFFFRRRRRRRRRRRGGGGKKKKKKKKKMMMMMMMMSSSSSSTTTTTTTKKKKKKKKKEEEEEEEEEVVVVVVVDDDDDDDDEEEEEEEEEQQQQQQQQQMMMMMMMMIIIIIIIINNNNNNNNVVVVVVVQQQQQQQQQNNNNNNNNKKKKKKKKKNNNNNNNNSSSSSSSSSSSSYYYYYYYYYYYYFFFFFFFFFFFVVVVVVVEEEEEEEEEWWWWWWWWWWWWWWIIIIIIIIPPPPPPPNNNNNNNNNNNNNNNNVVVVVVVKKKKKKKKKSSSSSSSSSSSSVVVVVVVCCCCCCDDDDDDDDIIIIIIIIPPPPPPPPPPPPPPRRRRRRRRRRRGGGGLLLLLLLLSSSSSSMMMMMMMMAAAAASSSSSSTTTTTTTFFFFFFFFFFFIIIIIIIIGGGGNNNNNNNNSSSSSSTTTTTTTSSSSSSIIIIIIIIQQQQQQQQQEEEEEEEEEMMMMMMMMFFFFFFFFFFFRRRRRRRRRRRRRRRRRRRRRRVVVVVVVSSSSSSEEEEEEEEEQQQQQQQQQFFFFFFFFFFFTTTTTTTAAAAAMMMMMMMMFFFFFFFFFFFRRRRRRRRRRRRRRRRRRRRRRKKKKKKKKKAAAAAFFFFFFFFFFFLLLLLLLLHHHHHHHHHHWWWWWWWWWWWWWWYYYYYYYYYYYYTTTTTTTGGGGEEEEEEEEEGGGGMMMMMMMMDDDDDDDDEEEEEEEEEMMMMMMMMEEEEEEEEEFFFFFFFFFFFTTTTTTTEEEEEEEEEAAAAAEEEEEEEEESSSSSSNNNNNNNNMMMMMMMMNNNNNNNNDDDDDDDDLLLLLLLLVVVVVVVSSSSSSEEEEEEEEEYYYYYYYYYYYYQQQQQQQQQQQQQQQQQQYYYYYYYYYYYYQQQQQQQQQDDDDDDDDAAAAATTTTTTTAAAAADDDDDDDDEEEEEEEEEEEEEEEEEEAAAAAEEEEEEEEEYYYYYYYYYYYYEEEEEEEEEDDDDDDDDEEEEEEEEEEEEEEEEEEAAAAAIIIIIIIIQQQQQQQQQDDDDDDDDEEEEEEEEEE

SEQ ID NO: 199 - protein, 3473 aa, Arabidopsis thaliana
MMMMMMMMRRRRRRRRRRREEEEEEEEEIIIIIIIILLLLLLLLHHHHHHHHHHIIIIIIIIQQQQQQQQQGGGGGGGGQQQQQQQQQCCCCCCGGGGNNNNNNNNQQQQQQQQQIIIIIIIIGGGGAAAAAKKKKKKKKKFFFFFFFFFFFWWWWWWWWWWWWWWEEEEEEEEEVVVVVVVIIIIIIIICCCCCCGGGGEEEEEEEEEHHHHHHHHHHGGGGIIIIIIIIDDDDDDDDQQQQQQQQQTTTTTTTGGGGQQQQQQQQQSSSSSSCCCCCCGGGGDDDDDDDDTTTTTTTDDDDDDDDLLLLLLLLQQQQQQQQQLLLLLLLLEEEEEEEEERRRRRRRRRRRIIIIIIIINNNNNNNNVVVVVVVYYYYYYYYYYYYFFFFFFFFFFFNNNNNNNNEEEEEEEEEAAAAASSSSSSGGGGGGGGKKKKKKKKKYYYYYYYYYYYYVVVVVVVPPPPPPPRRRRRRRRRRRAAAAAVVVVVVVLLLLLLLLMMMMMMMMDDDDDDDDLLLLLLLLEEEEEEEEEPPPPPPPGGGGTTTTTTTMMMMMMMMDDDDDDDDSSSSSSLLLLLLLLRRRRRRRRRRRSSSSSSGGGGPPPPPPPFFFFFFFFFFFGGGGQQQQQQQQQIIIIIIIIFFFFFFFFFFFRRRRRRRRRRRPPPPPPPDDDDDDDDNNNNNNNNFFFFFFFFFFFVVVVVVVFFFFFFFFFFFGGGGQQQQQQQQQSSSSSSGGGGAAAAAGGGGNNNNNNNNNNNNNNNNWWWWWWWWWWWWWWAAAAAKKKKKKKKKGGGGHHHHHHHHHHYYYYYYYYYYYYTTTTTTTEEEEEEEEEGGGGAAAAAEEEEEEEEELLLLLLLLIIIIIIIIDDDDDDDDSSSSSSVVVVVVVLLLLLLLLDDDDDDDDVVVVVVVVVVVVVVRRRRRRRRRRRKKKKKKKKKEEEEEEEEEAAAAAEEEEEEEEENNNNNNNNCCCCCCDDDDDDDDCCCCCCLLLLLLLLQQQQQQQQQGGGGFFFFFFFFFFFQQQQQQQQQVVVVVVVCCCCCCHHHHHHHHHHSSSSSSLLLLLLLLGGGGGGGGGGGGTTTTTTTGGGGSSSSSSGGGGMMMMMMMMGGGGTTTTTTTLLLLLLLLLLLLLLLLIIIIIIIISSSSSSKKKKKKKKKIIIIIIIIRRRRRRRRRRREEEEEEEEEEEEEEEEEEYYYYYYYYYYYYPPPPPPPDDDDDDDDRRRRRRRRRRRMMMMMMMMMMMMMMMMMMMMMMMMTTTTTTTFFFFFFFFFFFSSSSSSVVVVVVVFFFFFFFFFFFPPPPPPPSSSSSSPPPPPPPKKKKKKKKKVVVVVVVSSSSSSDDDDDDDDTTTTTTTVVVVVVVVVVVVVVEEEEEEEEEPPPPPPPYYYYYYYYYYYYNNNNNNNNAAAAATTTTTTTLLLLLLLLSSSSSSVVVVVVVHHHHHHHHHHQQQQQQQQQLLLLLLLLVVVVVVVEEEEEEEEENNNNNNNNAAAAADDDDDDDDEEEEEEEEECCCCCCMMMMMMMMVVVVVVVLLLLLLLLDDDDDDDDNNNNNNNNEEEEEEEEEAAAAALLLLLLLLYYYYYYYYYYYYDDDDDDDDIIIIIIIICCCCCCFFFFFFFFFFFRRRRRRRRRRRTTTTTTTLLLLLLLLKKKKKKKKKLLLLLLLLAAAAANNNNNNNNPPPPPPPTTTTTTTFFFFFFFFFFFGGGGDDDDDDDDLLLLLLLLNNNNNNNNHHHHHHHHHHLLLLLLLLIIIIIIIISSSSSSAAAAATTTTTTTMMMMMMMMSSSSSSGGGGVVVVVVVTTTTTTTCCCCCCCCCCCCLLLLLLLLRRRRRRRRRRRFFFFFFFFFFFPPPPPPPGGGGQQQQQQQQQLLLLLLLLNNNNNNNNSSSSSSDDDDDDDDLLLLLLLLRRRRRRRRRRRKKKKKKKKKLLLLLLLLAAAAAVVVVVVVNNNNNNNNLLLLLLLLIIIIIIIIPPPPPPPFFFFFFFFFFFPPPPPPPRRRRRRRRRRRLLLLLLLLHHHHHHHHHHFFFFFFFFFFFFFFFFFFFFFFMMMMMMMMVVVVVVVGGGGFFFFFFFFFFFAAAAAPPPPPPPLLLLLLLLTTTTTTTSSSSSSRRRRRRRRRRRGGGGSSSSSSQQQQQQQQQQQQQQQQQQYYYYYYYYYYYYSSSSSSAAAAALLLLLLLLSSSSSSVVVVVVVPPPPPPPEEEEEEEEELLLLLLLLTTTTTTTQQQQQQQQQQQQQQQQQQMMMMMMMMWWWWWWWWWWWWWWDDDDDDDDAAAAAKKKKKKKKKNNNNNNNNMMMMMMMMMMMMMMMMCCCCCCAAAAAAAAAADDDDDDDDPPPPPPPRRRRRRRRRRRHHHHHHHHHHGGGGRRRRRRRRRRRYYYYYYYYYYYYLLLLLLLLTTTTTTTAAAAASSSSSSAAAAAVVVVVVVFFFFFFFFFFFRRRRRRRRRRRGGGGKKKKKKKKKMMMMMMMMSSSSSSTTTTTTTKKKKKKKKKEEEEEEEEEVVVVVVVDDDDDDDDEEEEEEEEEQQQQQQQQQMMMMMMMMMMMMMMMMNNNNNNNNVVVVVVVQQQQQQQQQNNNNNNNNKKKKKKKKKNNNNNNNNSSSSSSSSSSSSYYYYYYYYYYYYFFFFFFFFFFFVVVVVVVEEEEEEEEEWWWWWWWWWWWWWWIIIIIIIIPPPPPPPNNNNNNNNNNNNNNNNVVVVVVVKKKKKKKKKSSSSSSSSSSSSVVVVVVVCCCCCCDDDDDDDDIIIIIIIIAAAAAPPPPPPPTTTTTTTGGGGLLLLLLLLKKKKKKKKKMMMMMMMMAAAAASSSSSSTTTTTTTFFFFFFFFFFFIIIIIIIIGGGGNNNNNNNNSSSSSSTTTTTTTSSSSSSIIIIIIIIQQQQQQQQQEEEEEEEEEMMMMMMMMFFFFFFFFFFFRRRRRRRRRRRRRRRRRRRRRRVVVVVVVSSSSSSEEEEEEEEEQQQQQQQQQFFFFFFFFFFFTTTTTTTAAAAAMMMMMMMMFFFFFFFFFFFRRRRRRRRRRRRRRRRRRRRRRKKKKKKKKKAAAAAFFFFFFFFFFFLLLLLLLLHHHHHHHHHHWWWWWWWWWWWWWWYYYYYYYYYYYYTTTTTTTGGGGEEEEEEEEEGGGGMMMMMMMMDDDDDDDDEEEEEEEEEMMMMMMMMEEEEEEEEEFFFFFFFFFFFTTTTTTTEEEEEEEEEAAAAAEEEEEEEEESSSSSSNNNNNNNNMMMMMMMMNNNNNNNNDDDDDDDDLLLLLLLLVVVVVVVAAAAAEEEEEEEEEYYYYYYYYYYYYQQQQQQQQQQQQQQQQQQYYYYYYYYYYYYQQQQQQQQQDDDDDDDDAAAAATTTTTTTVVVVVVVGGGGEEEEEEEEEEEEEEEEEEEEEEEEEEEYYYYYYYYYYYYEEEEEEEEEEEEEEEEEEDDDDDDDDEEEEEEEEEEEEEEEEEEEEEEEEEEEEEEEEEEEEEEEEEEEEEAAAAAA

SEQ ID NO: 200 - protein, 3488 aa, Achlya klebsiana
MMMMMMMMRRRRRRRRRRREEEEEEEEELLLLLLLLVVVVVVVHHHHHHHHHHIIIIIIIIQQQQQQQQQGGGGGGGGQQQQQQQQQCCCCCCGGGGNNNNNNNNQQQQQQQQQIIIIIIIIGGGGAAAAAKKKKKKKKKFFFFFFFFFFFWWWWWWWWWWWWWWEEEEEEEEEVVVVVVVIIIIIIIISSSSSSDDDDDDDDEEEEEEEEEHHHHHHHHHHGGGGVVVVVVVDDDDDDDDPPPPPPPTTTTTTTGGGGSSSSSSYYYYYYYYYYYYHHHHHHHHHHGGGGDDDDDDDDSSSSSSDDDDDDDDLLLLLLLLQQQQQQQQQLLLLLLLLEEEEEEEEERRRRRRRRRRRIIIIIIIINNNNNNNNVVVVVVVYYYYYYYYYYYYYYYYYYYYYYYYNNNNNNNNEEEEEEEEEAAAAATTTTTTTGGGGTTTTTTTYYYYYYYYYYYYVVVVVVVPPPPPPPRRRRRRRRRRRAAAAAIIIIIIIILLLLLLLLMMMMMMMMDDDDDDDDLLLLLLLLEEEEEEEEEPPPPPPPGGGGTTTTTTTMMMMMMMMDDDDDDDDSSSSSSVVVVVVVRRRRRRRRRRRAAAAAGGGGPPPPPPPYYYYYYYYYYYYGGGGQQQQQQQQQLLLLLLLLFFFFFFFFFFFRRRRRRRRRRRPPPPPPPDDDDDDDDNNNNNNNNFFFFFFFFFFFVVVVVVVFFFFFFFFFFFGGGGQQQQQQQQQTTTTTTTGGGGAAAAAGGGGNNNNNNNNNNNNNNNNWWWWWWWWWWWWWWAAAAAKKKKKKKKKGGGGHHHHHHHHHHYYYYYYYYYYYYTTTTTTTEEEEEEEEEGGGGAAAAAEEEEEEEEELLLLLLLLIIIIIIIIDDDDDDDDSSSSSSVVVVVVVLLLLLLLLDDDDDDDDVVVVVVVVVVVVVVRRRRRRRRRRRKKKKKKKKKEEEEEEEEEAAAAAEEEEEEEEESSSSSSCCCCCCDDDDDDDDCCCCCCLLLLLLLLQQQQQQQQQGGGGFFFFFFFFFFFQQQQQQQQQIIIIIIIITTTTTTTHHHHHHHHHHSSSSSSLLLLLLLLGGGGGGGGGGGGTTTTTTTGGGGSSSSSSGGGGMMMMMMMMGGGGTTTTTTTLLLLLLLLLLLLLLLLIIIIIIIISSSSSSKKKKKKKKKIIIIIIIIRRRRRRRRRRREEEEEEEEEEEEEEEEEEYYYYYYYYYYYYPPPPPPPDDDDDDDDRRRRRRRRRRRIIIIIIIIMMMMMMMMCCCCCCTTTTTTTYYYYYYYYYYYYSSSSSSVVVVVVVCCCCCCPPPPPPPSSSSSSPPPPPPPKKKKKKKKKVVVVVVVSSSSSSDDDDDDDDTTTTTTTVVVVVVVVVVVVVVEEEEEEEEEPPPPPPPYYYYYYYYYYYYNNNNNNNNAAAAATTTTTTTLLLLLLLLSSSSSSVVVVVVVHHHHHHHHHHQQQQQQQQQLLLLLLLLVVVVVVVEEEEEEEEENNNNNNNNAAAAADDDDDDDDEEEEEEEEEVVVVVVVMMMMMMMMCCCCCCLLLLLLLLDDDDDDDDNNNNNNNNEEEEEEEEEAAAAALLLLLLLLYYYYYYYYYYYYDDDDDDDDIIIIIIIICCCCCCFFFFFFFFFFFRRRRRRRRRRRTTTTTTTLLLLLLLLKKKKKKKKKLLLLLLLLTTTTTTTNNNNNNNNPPPPPPPTTTTTTTYYYYYYYYYYYYGGGGDDDDDDDDLLLLLLLLNNNNNNNNHHHHHHHHHHLLLLLLLLVVVVVVVCCCCCCAAAAAAAAAAMMMMMMMMSSSSSSGGGGIIIIIIIITTTTTTTTTTTTTTLLLLLLLLLLLLLLLLRRRRRRRRRRRFFFFFFFFFFFPPPPPPPGGGGQQQQQQQQQLLLLLLLLNNNNNNNNSSSSSSVVVVVVVLLLLLLLLKKKKKKKKKLLLLLLLLAAAAAVVVVVVVNNNNNNNNLLLLLLLLIIIIIIIIPPPPPPPFFFFFFFFFFFPPPPPPPRRRRRRRRRRRLLLLLLLLHHHHHHHHHHFFFFFFFFFFFFFFFFFFFFFFMMMMMMMMIIIIIIIIGGGGFFFFFFFFFFFAAAAAPPPPPPPLLLLLLLLTTTTTTTSSSSSSRRRRRRRRRRRGGGGSSSSSSQQQQQQQQQQQQQQQQQQYYYYYYYYYYYYRRRRRRRRRRRAAAAALLLLLLLLTTTTTTTVVVVVVVPPPPPPPEEEEEEEEELLLLLLLLTTTTTTTQQQQQQQQQQQQQQQQQQQQQQQQQQQFFFFFFFFFFFDDDDDDDDAAAAAKKKKKKKKKNNNNNNNNMMMMMMMMMMMMMMMMCCCCCCAAAAAAAAAADDDDDDDDPPPPPPPRRRRRRRRRRRHHHHHHHHHHGGGGRRRRRRRRRRRYYYYYYYYYYYYLLLLLLLLTTTTTTTAAAAAAAAAACCCCCCMMMMMMMMFFFFFFFFFFFRRRRRRRRRRRGGGGRRRRRRRRRRRMMMMMMMMSSSSSSTTTTTTTKKKKKKKKKEEEEEEEEEVVVVVVVDDDDDDDDEEEEEEEEEQQQQQQQQQMMMMMMMMLLLLLLLLNNNNNNNNVVVVVVVQQQQQQQQQNNNNNNNNKKKKKKKKKNNNNNNNNSSSSSSSSSSSSYYYYYYYYYYYYFFFFFFFFFFFVVVVVVVEEEEEEEEEWWWWWWWWWWWWWWIIIIIIIIPPPPPPPNNNNNNNNNNNNNNNNIIIIIIIIKKKKKKKKKAAAAASSSSSSVVVVVVVCCCCCCDDDDDDDDIIIIIIIIPPPPPPPPPPPPPPKKKKKKKKKGGGGLLLLLLLLKKKKKKKKKMMMMMMMMSSSSSSTTTTTTTTTTTTTTFFFFFFFFFFFIIIIIIIIGGGGNNNNNNNNSSSSSSTTTTTTTAAAAAIIIIIIIIQQQQQQQQQEEEEEEEEEMMMMMMMMFFFFFFFFFFFKKKKKKKKKRRRRRRRRRRRVVVVVVVSSSSSSEEEEEEEEEQQQQQQQQQFFFFFFFFFFFTTTTTTTAAAAAMMMMMMMMFFFFFFFFFFFRRRRRRRRRRRRRRRRRRRRRRKKKKKKKKKAAAAAFFFFFFFFFFFLLLLLLLLHHHHHHHHHHWWWWWWWWWWWWWWYYYYYYYYYYYYTTTTTTTGGGGEEEEEEEEEGGGGMMMMMMMMDDDDDDDDEEEEEEEEEMMMMMMMMEEEEEEEEEFFFFFFFFFFFTTTTTTTEEEEEEEEEAAAAAEEEEEEEEESSSSSSNNNNNNNNMMMMMMMMNNNNNNNNDDDDDDDDLLLLLLLLVVVVVVVSSSSSSEEEEEEEEEYYYYYYYYYYYYQQQQQQQQQQQQQQQQQQYYYYYYYYYYYYQQQQQQQQQDDDDDDDDAAAAATTTTTTTAAAAAEEEEEEEEEEEEEEEEEEEEEEEEEEEGGGGEEEEEEEEEFFFFFFFFFFFDDDDDDDDEEEEEEEEEDDDDDDDDEEEEEEEEEEEEEEEEEEMMMMMMMMDDDDDDDDEEEEEEEEEMMMMMMMMMMMMMMMMM

SEQ ID NO: 201 - protein, 3511 aa, Neotyphodium coenophialum
MMMMMMMMRRRRRRRRRRREEEEEEEEEIIIIIIIIVVVVVVVHHHHHHHHHHLLLLLLLLQQQQQQQQQTTTTTTTGGGGQQQQQQQQQCCCCCCGGGGNNNNNNNNQQQQQQQQQIIIIIIIIGGGGAAAAAAAAAAFFFFFFFFFFFWWWWWWWWWWWWWWQQQQQQQQQTTTTTTTIIIIIIIISSSSSSGGGGEEEEEEEEEHHHHHHHHHHGGGGLLLLLLLLDDDDDDDDSSSSSSNNNNNNNNGGGGVVVVVVVYYYYYYYYYYYYNNNNNNNNGGGGTTTTTTTSSSSSSEEEEEEEEELLLLLLLLQQQQQQQQQLLLLLLLLEEEEEEEEERRRRRRRRRRRMMMMMMMMSSSSSSVVVVVVVYYYYYYYYYYYYFFFFFFFFFFFNNNNNNNNEEEEEEEEEAAAAASSSSSSGGGGNNNNNNNNKKKKKKKKKYYYYYYYYYYYYVVVVVVVPPPPPPPRRRRRRRRRRRAAAAAVVVVVVVLLLLLLLLVVVVVVVDDDDDDDDLLLLLLLLEEEEEEEEEPPPPPPPGGGGTTTTTTTMMMMMMMMDDDDDDDDAAAAAVVVVVVVRRRRRRRRRRRAAAAAGGGGPPPPPPPFFFFFFFFFFFGGGGQQQQQQQQQLLLLLLLLFFFFFFFFFFFRRRRRRRRRRRPPPPPPPDDDDDDDDNNNNNNNNFFFFFFFFFFFVVVVVVVFFFFFFFFFFFGGGGQQQQQQQQQSSSSSSGGGGAAAAAGGGGNNNNNNNNNNNNNNNNWWWWWWWWWWWWWWAAAAAKKKKKKKKKGGGGHHHHHHHHHHYYYYYYYYYYYYTTTTTTTEEEEEEEEEGGGGAAAAAEEEEEEEEELLLLLLLLVVVVVVVDDDDDDDDQQQQQQQQQVVVVVVVLLLLLLLLDDDDDDDDVVVVVVVVVVVVVVRRRRRRRRRRRRRRRRRRRRRREEEEEEEEEAAAAAEEEEEEEEEGGGGCCCCCCDDDDDDDDCCCCCCLLLLLLLLQQQQQQQQQGGGGFFFFFFFFFFFQQQQQQQQQIIIIIIIITTTTTTTHHHHHHHHHHSSSSSSLLLLLLLLGGGGGGGGGGGGTTTTTTTGGGGAAAAAGGGGMMMMMMMMGGGGTTTTTTTLLLLLLLLLLLLLLLLIIIIIIIISSSSSSKKKKKKKKKIIIIIIIIRRRRRRRRRRREEEEEEEEEEEEEEEEEEFFFFFFFFFFFPPPPPPPDDDDDDDDRRRRRRRRRRRMMMMMMMMMMMMMMMMAAAAATTTTTTTFFFFFFFFFFFSSSSSSVVVVVVVVVVVVVVPPPPPPPSSSSSSPPPPPPPKKKKKKKKKVVVVVVVSSSSSSDDDDDDDDTTTTTTTVVVVVVVVVVVVVVEEEEEEEEEPPPPPPPYYYYYYYYYYYYNNNNNNNNAAAAATTTTTTTLLLLLLLLSSSSSSVVVVVVVHHHHHHHHHHQQQQQQQQQLLLLLLLLVVVVVVVEEEEEEEEENNNNNNNNSSSSSSDDDDDDDDEEEEEEEEETTTTTTTFFFFFFFFFFFCCCCCCIIIIIIIIDDDDDDDDNNNNNNNNEEEEEEEEEAAAAALLLLLLLLYYYYYYYYYYYYDDDDDDDDIIIIIIIICCCCCCMMMMMMMMRRRRRRRRRRRTTTTTTTLLLLLLLLKKKKKKKKKLLLLLLLLSSSSSSNNNNNNNNPPPPPPPSSSSSSYYYYYYYYYYYYGGGGDDDDDDDDLLLLLLLLNNNNNNNNYYYYYYYYYYYYLLLLLLLLVVVVVVVSSSSSSAAAAAVVVVVVVMMMMMMMMSSSSSSGGGGVVVVVVVTTTTTTTTTTTTTTCCCCCCLLLLLLLLRRRRRRRRRRRFFFFFFFFFFFPPPPPPPGGGGQQQQQQQQQLLLLLLLLNNNNNNNNSSSSSSDDDDDDDDLLLLLLLLRRRRRRRRRRRKKKKKKKKKLLLLLLLLAAAAAVVVVVVVNNNNNNNNMMMMMMMMVVVVVVVPPPPPPPFFFFFFFFFFFPPPPPPPRRRRRRRRRRRLLLLLLLLHHHHHHHHHHFFFFFFFFFFFFFFFFFFFFFFMMMMMMMMVVVVVVVGGGGFFFFFFFFFFFAAAAAPPPPPPPLLLLLLLLTTTTTTTSSSSSSRRRRRRRRRRRGGGGAAAAAHHHHHHHHHHSSSSSSFFFFFFFFFFFRRRRRRRRRRRAAAAAVVVVVVVSSSSSSVVVVVVVPPPPPPPEEEEEEEEELLLLLLLLTTTTTTTQQQQQQQQQQQQQQQQQQMMMMMMMMFFFFFFFFFFFDDDDDDDDPPPPPPPKKKKKKKKKNNNNNNNNMMMMMMMMMMMMMMMMAAAAAAAAAASSSSSSDDDDDDDDFFFFFFFFFFFRRRRRRRRRRRNNNNNNNNGGGGRRRRRRRRRRRYYYYYYYYYYYYLLLLLLLLTTTTTTTCCCCCCSSSSSSAAAAAIIIIIIIIFFFFFFFFFFFRRRRRRRRRRRGGGGKKKKKKKKKVVVVVVVAAAAAMMMMMMMMKKKKKKKKKEEEEEEEEEVVVVVVVEEEEEEEEEDDDDDDDDQQQQQQQQQMMMMMMMMRRRRRRRRRRRNNNNNNNNVVVVVVVQQQQQQQQQNNNNNNNNKKKKKKKKKNNNNNNNNSSSSSSSSSSSSYYYYYYYYYYYYFFFFFFFFFFFVVVVVVVEEEEEEEEEWWWWWWWWWWWWWWIIIIIIIIPPPPPPPNNNNNNNNNNNNNNNNIIIIIIIIQQQQQQQQQTTTTTTTAAAAALLLLLLLLCCCCCCAAAAAIIIIIIIIPPPPPPPPPPPPPPRRRRRRRRRRRDDDDDDDDLLLLLLLLKKKKKKKKKMMMMMMMMSSSSSSSSSSSSTTTTTTTFFFFFFFFFFFIIIIIIIIGGGGNNNNNNNNSSSSSSTTTTTTTSSSSSSIIIIIIIIQQQQQQQQQEEEEEEEEELLLLLLLLFFFFFFFFFFFKKKKKKKKKRRRRRRRRRRRVVVVVVVGGGGEEEEEEEEEQQQQQQQQQFFFFFFFFFFFTTTTTTTAAAAAMMMMMMMMFFFFFFFFFFFRRRRRRRRRRRRRRRRRRRRRRKKKKKKKKKAAAAAFFFFFFFFFFFLLLLLLLLHHHHHHHHHHWWWWWWWWWWWWWWYYYYYYYYYYYYTTTTTTTGGGGEEEEEEEEEGGGGMMMMMMMMDDDDDDDDEEEEEEEEEMMMMMMMMEEEEEEEEEFFFFFFFFFFFTTTTTTTEEEEEEEEEAAAAAEEEEEEEEESSSSSSNNNNNNNNMMMMMMMMNNNNNNNNDDDDDDDDLLLLLLLLVVVVVVVSSSSSSEEEEEEEEEYYYYYYYYYYYYQQQQQQQQQQQQQQQQQQYYYYYYYYYYYYQQQQQQQQQDDDDDDDDAAAAAGGGGIIIIIIIIDDDDDDDDEEEEEEEEEEEEEEEEEEEEEEEEEEEEEEEEEEEEEEEEEEEEEYYYYYYYYYYYYEEEEEEEEEEEEEEEEEEEEEEEEEEEAAAAAPPPPPPPVVVVVVVDDDDDDDDEEEEEEEEEPPPPPPPLLLLLLLLEEEEEEEEEE

SEQ ID NO: 202 - protein, 3520 aa, Ajellomyces capsulatus
MMMMMMMMRRRRRRRRRRREEEEEEEEEIIIIIIIIVVVVVVVHHHHHHHHHHLLLLLLLLQQQQQQQQQTTTTTTTGGGGQQQQQQQQQCCCCCCGGGGNNNNNNNNQQQQQQQQQIIIIIIIIGGGGAAAAAAAAAAFFFFFFFFFFFWWWWWWWWWWWWWWQQQQQQQQQTTTTTTTIIIIIIIISSSSSSGGGGEEEEEEEEEHHHHHHHHHHGGGGVVVVVVVDDDDDDDDGGGGAAAAAGGGGYYYYYYYYYYYYYYYYYYYYYYYYNNNNNNNNGGGGSSSSSSLLLLLLLLDDDDDDDDIIIIIIIIQQQQQQQQQLLLLLLLLEEEEEEEEERRRRRRRRRRRMMMMMMMMNNNNNNNNVVVVVVVYYYYYYYYYYYYFFFFFFFFFFFNNNNNNNNEEEEEEEEEAAAAAAAAAAEEEEEEEEEKKKKKKKKKKKKKKKKKKYYYYYYYYYYYYVVVVVVVPPPPPPPRRRRRRRRRRRAAAAAVVVVVVVLLLLLLLLVVVVVVVDDDDDDDDLLLLLLLLEEEEEEEEEPPPPPPPGGGGTTTTTTTMMMMMMMMDDDDDDDDSSSSSSVVVVVVVRRRRRRRRRRRAAAAAGGGGPPPPPPPFFFFFFFFFFFGGGGQQQQQQQQQLLLLLLLLFFFFFFFFFFFRRRRRRRRRRRPPPPPPPDDDDDDDDNNNNNNNNFFFFFFFFFFFVVVVVVVFFFFFFFFFFFVVVVVVVQQQQQQQQQSSSSSSGGGGAAAAAGGGGNNNNNNNNTTTTTTTWWWWWWWWWWWWWWAAAAAKKKKKKKKKGGGGHHHHHHHHHHYYYYYYYYYYYYTTTTTTTEEEEEEEEEGGGGSSSSSSEEEEEEEEELLLLLLLLVVVVVVVDDDDDDDDQQQQQQQQQVVVVVVVIIIIIIIIDDDDDDDDVVVVVVVVVVVVVVRRRRRRRRRRRRRRRRRRRRRREEEEEEEEEAAAAAEEEEEEEEERRRRRRRRRRRCCCCCCDDDDDDDDCCCCCCLLLLLLLLQQQQQQQQQGGGGFFFFFFFFFFFQQQQQQQQQIIIIIIIIIIIIIIIIHHHHHHHHHHSSSSSSLLLLLLLLGGGGGGGGGGGGTTTTTTTGGGGAAAAAGGGGMMMMMMMMGGGGTTTTTTTLLLLLLLLLLLLLLLLIIIIIIIISSSSSSKKKKKKKKKIIIIIIIIRRRRRRRRRRREEEEEEEEEEEEEEEEEEFFFFFFFFFFFPPPPPPPDDDDDDDDRRRRRRRRRRRMMMMMMMMMMMMMMMMAAAAATTTTTTTFFFFFFFFFFFSSSSSSSSSSSSVVVVVVVVVVVVVVPPPPPPPSSSSSSPPPPPPPKKKKKKKKKVVVVVVVSSSSSSDDDDDDDDTTTTTTTVVVVVVVVVVVVVVEEEEEEEEEPPPPPPPYYYYYYYYYYYYNNNNNNNNAAAAATTTTTTTLLLLLLLLSSSSSSNNNNNNNNHHHHHHHHHHQQQQQQQQQLLLLLLLLVVVVVVVEEEEEEEEENNNNNNNNSSSSSSDDDDDDDDEEEEEEEEETTTTTTTFFFFFFFFFFFCCCCCCIIIIIIIIDDDDDDDDNNNNNNNNEEEEEEEEEAAAAALLLLLLLLYYYYYYYYYYYYDDDDDDDDIIIIIIIICCCCCCMMMMMMMMRRRRRRRRRRRTTTTTTTLLLLLLLLKKKKKKKKKLLLLLLLLSSSSSSEEEEEEEEEPPPPPPPSSSSSSYYYYYYYYYYYYGGGGDDDDDDDDLLLLLLLLNNNNNNNNHHHHHHHHHHLLLLLLLLVVVVVVVSSSSSSAAAAAVVVVVVVMMMMMMMMSSSSSSGGGGVVVVVVVTTTTTTTTTTTTTTCCCCCCLLLLLLLLRRRRRRRRRRRFFFFFFFFFFFPPPPPPPGGGGQQQQQQQQQLLLLLLLLNNNNNNNNSSSSSSDDDDDDDDLLLLLLLLRRRRRRRRRRRKKKKKKKKKLLLLLLLLAAAAAVVVVVVVNNNNNNNNMMMMMMMMVVVVVVVPPPPPPPFFFFFFFFFFFPPPPPPPRRRRRRRRRRRLLLLLLLLHHHHHHHHHHFFFFFFFFFFFFFFFFFFFFFFMMMMMMMMVVVVVVVGGGGFFFFFFFFFFFAAAAAPPPPPPPLLLLLLLLTTTTTTTSSSSSSRRRRRRRRRRRGGGGAAAAAYYYYYYYYYYYYSSSSSSFFFFFFFFFFFRRRRRRRRRRRVVVVVVVVVVVVVVTTTTTTTVVVVVVVPPPPPPPEEEEEEEEELLLLLLLLTTTTTTTQQQQQQQQQKKKKKKKKKMMMMMMMMYYYYYYYYYYYYDDDDDDDDPPPPPPPKKKKKKKKKNNNNNNNNMMMMMMMMMMMMMMMMCCCCCCLLLLLLLLLLLLLLLLDDDDDDDDFFFFFFFFFFFRRRRRRRRRRRNNNNNNNNGGGGRRRRRRRRRRRYYYYYYYYYYYYLLLLLLLLTTTTTTTAAAAASSSSSSAAAAAIIIIIIIIFFFFFFFFFFFRRRRRRRRRRRGGGGKKKKKKKKKVVVVVVVSSSSSSMMMMMMMMKKKKKKKKKEEEEEEEEEVVVVVVVEEEEEEEEEDDDDDDDDQQQQQQQQQMMMMMMMMRRRRRRRRRRRNNNNNNNNVVVVVVVQQQQQQQQQNNNNNNNNKKKKKKKKKNNNNNNNNHHHHHHHHHHTTTTTTTYYYYYYYYYYYYFFFFFFFFFFFVVVVVVVEEEEEEEEEWWWWWWWWWWWWWWIIIIIIIIPPPPPPPNNNNNNNNNNNNNNNNVVVVVVVQQQQQQQQQTTTTTTTAAAAALLLLLLLLCCCCCCSSSSSSIIIIIIIIPPPPPPPPPPPPPPRRRRRRRRRRRGGGGLLLLLLLLKKKKKKKKKMMMMMMMMSSSSSSSSSSSSTTTTTTTFFFFFFFFFFFVVVVVVVEEEEEEEEENNNNNNNNSSSSSSTTTTTTTAAAAAIIIIIIIIQQQQQQQQQEEEEEEEEELLLLLLLLFFFFFFFFFFFKKKKKKKKKRRRRRRRRRRRVVVVVVVGGGGDDDDDDDDQQQQQQQQQFFFFFFFFFFFTTTTTTTAAAAAMMMMMMMMFFFFFFFFFFFRRRRRRRRRRRRRRRRRRRRRRKKKKKKKKKAAAAAFFFFFFFFFFFLLLLLLLLHHHHHHHHHHWWWWWWWWWWWWWWYYYYYYYYYYYYTTTTTTTGGGGEEEEEEEEEGGGGMMMMMMMMDDDDDDDDEEEEEEEEEMMMMMMMMEEEEEEEEEFFFFFFFFFFFTTTTTTTEEEEEEEEEAAAAAEEEEEEEEESSSSSSNNNNNNNNMMMMMMMMNNNNNNNNDDDDDDDDLLLLLLLLVVVVVVVSSSSSSEEEEEEEEEYYYYYYYYYYYYQQQQQQQQQQQQQQQQQQYYYYYYYYYYYYQQQQQQQQQDDDDDDDDAAAAASSSSSSIIIIIIIISSSSSSEEEEEEEEEGGGGEEEEEEEEEDDDDDDDDEEEEEEEEEYYYYYYYYYYYYFFFFFFFFFFFDDDDDDDDYYYYYYYYYYYYAAAAAWWWWWWWWWWWWWWAAAAAMMMMMMMMM

SEQ ID NO: 203 - protein, 3511 aa, Aspergillus flavus
MMMMMMMMRRRRRRRRRRREEEEEEEEEIIIIIIIIVVVVVVVHHHHHHHHHHLLLLLLLLQQQQQQQQQTTTTTTTGGGGQQQQQQQQQCCCCCCGGGGNNNNNNNNQQQQQQQQQIIIIIIIIGGGGAAAAAAAAAAFFFFFFFFFFFWWWWWWWWWWWWWWQQQQQQQQQTTTTTTTIIIIIIIISSSSSSGGGGEEEEEEEEEHHHHHHHHHHGGGGLLLLLLLLDDDDDDDDGGGGSSSSSSGGGGVVVVVVVYYYYYYYYYYYYNNNNNNNNGGGGSSSSSSSSSSSSDDDDDDDDLLLLLLLLQQQQQQQQQLLLLLLLLEEEEEEEEERRRRRRRRRRRMMMMMMMMNNNNNNNNVVVVVVVYYYYYYYYYYYYFFFFFFFFFFFNNNNNNNNEEEEEEEEEAAAAASSSSSSGGGGNNNNNNNNKKKKKKKKKYYYYYYYYYYYYVVVVVVVPPPPPPPRRRRRRRRRRRAAAAAVVVVVVVLLLLLLLLVVVVVVVDDDDDDDDLLLLLLLLEEEEEEEEEPPPPPPPGGGGTTTTTTTMMMMMMMMDDDDDDDDAAAAAVVVVVVVRRRRRRRRRRRAAAAAGGGGPPPPPPPFFFFFFFFFFFGGGGQQQQQQQQQLLLLLLLLFFFFFFFFFFFRRRRRRRRRRRPPPPPPPDDDDDDDDNNNNNNNNFFFFFFFFFFFVVVVVVVFFFFFFFFFFFGGGGQQQQQQQQQSSSSSSGGGGAAAAAGGGGNNNNNNNNNNNNNNNNWWWWWWWWWWWWWWAAAAAKKKKKKKKKGGGGHHHHHHHHHHYYYYYYYYYYYYTTTTTTTEEEEEEEEEGGGGAAAAAEEEEEEEEELLLLLLLLVVVVVVVDDDDDDDDQQQQQQQQQVVVVVVVVVVVVVVDDDDDDDDVVVVVVVVVVVVVVRRRRRRRRRRRRRRRRRRRRRREEEEEEEEEAAAAAEEEEEEEEEGGGGCCCCCCDDDDDDDDCCCCCCLLLLLLLLQQQQQQQQQGGGGFFFFFFFFFFFQQQQQQQQQIIIIIIIITTTTTTTHHHHHHHHHHSSSSSSLLLLLLLLGGGGGGGGGGGGTTTTTTTGGGGAAAAAGGGGMMMMMMMMGGGGTTTTTTTLLLLLLLLLLLLLLLLIIIIIIIISSSSSSKKKKKKKKKIIIIIIIIRRRRRRRRRRREEEEEEEEEEEEEEEEEEFFFFFFFFFFFPPPPPPPDDDDDDDDRRRRRRRRRRRMMMMMMMMMMMMMMMMAAAAATTTTTTTYYYYYYYYYYYYSSSSSSVVVVVVVVVVVVVVPPPPPPPSSSSSSPPPPPPPKKKKKKKKKVVVVVVVSSSSSSDDDDDDDDTTTTTTTVVVVVVVVVVVVVVEEEEEEEEEPPPPPPPYYYYYYYYYYYYNNNNNNNNAAAAATTTTTTTLLLLLLLLSSSSSSVVVVVVVHHHHHHHHHHQQQQQQQQQLLLLLLLLVVVVVVVEEEEEEEEEHHHHHHHHHHSSSSSSDDDDDDDDEEEEEEEEETTTTTTTFFFFFFFFFFFCCCCCCIIIIIIIIDDDDDDDDNNNNNNNNEEEEEEEEEAAAAALLLLLLLLYYYYYYYYYYYYDDDDDDDDIIIIIIIICCCCCCMMMMMMMMRRRRRRRRRRRTTTTTTTLLLLLLLLKKKKKKKKKLLLLLLLLSSSSSSNNNNNNNNPPPPPPPSSSSSSYYYYYYYYYYYYGGGGDDDDDDDDLLLLLLLLNNNNNNNNHHHHHHHHHHLLLLLLLLVVVVVVVSSSSSSAAAAAVVVVVVVMMMMMMMMSSSSSSGGGGVVVVVVVTTTTTTTTTTTTTTCCCCCCLLLLLLLLRRRRRRRRRRRFFFFFFFFFFFPPPPPPPGGGGQQQQQQQQQLLLLLLLLNNNNNNNNSSSSSSDDDDDDDDLLLLLLLLRRRRRRRRRRRKKKKKKKKKLLLLLLLLAAAAAVVVVVVVNNNNNNNNMMMMMMMMVVVVVVVPPPPPPPFFFFFFFFFFFPPPPPPPRRRRRRRRRRRLLLLLLLLHHHHHHHHHHFFFFFFFFFFFFFFFFFFFFFFMMMMMMMMVVVVVVVGGGGFFFFFFFFFFFAAAAAPPPPPPPLLLLLLLLTTTTTTTSSSSSSRRRRRRRRRRRGGGGAAAAAHHHHHHHHHHSSSSSSFFFFFFFFFFFRRRRRRRRRRRAAAAAVVVVVVVSSSSSSVVVVVVVPPPPPPPEEEEEEEEELLLLLLLLTTTTTTTQQQQQQQQQQQQQQQQQQMMMMMMMMFFFFFFFFFFFDDDDDDDDPPPPPPPKKKKKKKKKNNNNNNNNMMMMMMMMMMMMMMMMAAAAAAAAAASSSSSSDDDDDDDDFFFFFFFFFFFRRRRRRRRRRRNNNNNNNNGGGGRRRRRRRRRRRYYYYYYYYYYYYLLLLLLLLTTTTTTTCCCCCCSSSSSSAAAAAIIIIIIIIFFFFFFFFFFFRRRRRRRRRRRGGGGKKKKKKKKKVVVVVVVSSSSSSMMMMMMMMKKKKKKKKKEEEEEEEEEVVVVVVVEEEEEEEEEDDDDDDDDQQQQQQQQQMMMMMMMMRRRRRRRRRRRNNNNNNNNIIIIIIIIQQQQQQQQQSSSSSSKKKKKKKKKNNNNNNNNQQQQQQQQQTTTTTTTYYYYYYYYYYYYFFFFFFFFFFFVVVVVVVEEEEEEEEEWWWWWWWWWWWWWWIIIIIIIIPPPPPPPNNNNNNNNNNNNNNNNIIIIIIIIQQQQQQQQQTTTTTTTAAAAALLLLLLLLCCCCCCSSSSSSIIIIIIIIPPPPPPPPPPPPPPRRRRRRRRRRRGGGGLLLLLLLLKKKKKKKKKMMMMMMMMSSSSSSSSSSSSTTTTTTTFFFFFFFFFFFIIIIIIIIGGGGNNNNNNNNSSSSSSTTTTTTTSSSSSSIIIIIIIIQQQQQQQQQEEEEEEEEELLLLLLLLFFFFFFFFFFFKKKKKKKKKRRRRRRRRRRRVVVVVVVGGGGDDDDDDDDQQQQQQQQQFFFFFFFFFFFTTTTTTTAAAAAMMMMMMMMFFFFFFFFFFFRRRRRRRRRRRRRRRRRRRRRRKKKKKKKKKAAAAAFFFFFFFFFFFLLLLLLLLHHHHHHHHHHWWWWWWWWWWWWWWYYYYYYYYYYYYTTTTTTTGGGGEEEEEEEEEGGGGMMMMMMMMDDDDDDDDEEEEEEEEEMMMMMMMMEEEEEEEEEFFFFFFFFFFFTTTTTTTEEEEEEEEEAAAAAEEEEEEEEESSSSSSNNNNNNNNMMMMMMMMNNNNNNNNDDDDDDDDLLLLLLLLVVVVVVVSSSSSSEEEEEEEEEYYYYYYYYYYYYQQQQQQQQQQQQQQQQQQYYYYYYYYYYYYQQQQQQQQQDDDDDDDDAAAAASSSSSSIIIIIIIISSSSSSEEEEEEEEEGGGGEEEEEEEEEEEEEEEEEEEEEEEEEEEYYYYYYYYYYYYLLLLLLLLEEEEEEEEEEEEEEEEEEEEEEEEEEEEEEEEEEEEPPPPPPPLLLLLLLLEEEEEEEEEHHHHHHHHHHEEEEEEEEEEEEEEEEEEE

SEQ ID NO: 204 - protein, 3513 aa, Aspergillus parasiticus
MMMMMMMMRRRRRRRRRRREEEEEEEEEIIIIIIIIVVVVVVVYYYYYYYYYYYYLLLLLLLLQQQQQQQQQTTTTTTTGGGGQQQQQQQQQCCCCCCGGGGNNNNNNNNQQQQQQQQQIIIIIIIIGGGGAAAAAAAAAAFFFFFFFFFFFWWWWWWWWWWWWWWQQQQQQQQQTTTTTTTIIIIIIIISSSSSSGGGGEEEEEEEEEHHHHHHHHHHGGGGLLLLLLLLDDDDDDDDGGGGSSSSSSGGGGVVVVVVVYYYYYYYYYYYYNNNNNNNNGGGGSSSSSSSSSSSSDDDDDDDDLLLLLLLLQQQQQQQQQLLLLLLLLEEEEEEEEERRRRRRRRRRRMMMMMMMMNNNNNNNNVVVVVVVYYYYYYYYYYYYFFFFFFFFFFFNNNNNNNNEEEEEEEEEAAAAASSSSSSGGGGNNNNNNNNKKKKKKKKKYYYYYYYYYYYYVVVVVVVPPPPPPPRRRRRRRRRRRAAAAAVVVVVVVLLLLLLLLVVVVVVVDDDDDDDDLLLLLLLLEEEEEEEEEPPPPPPPGGGGTTTTTTTMMMMMMMMDDDDDDDDAAAAAVVVVVVVRRRRRRRRRRRAAAAAGGGGPPPPPPPFFFFFFFFFFFGGGGQQQQQQQQQLLLLLLLLFFFFFFFFFFFRRRRRRRRRRRPPPPPPPDDDDDDDDNNNNNNNNFFFFFFFFFFFVVVVVVVFFFFFFFFFFFGGGGQQQQQQQQQSSSSSSGGGGAAAAAGGGGNNNNNNNNNNNNNNNNWWWWWWWWWWWWWWAAAAAKKKKKKKKKGGGGHHHHHHHHHHYYYYYYYYYYYYTTTTTTTEEEEEEEEEGGGGAAAAAEEEEEEEEELLLLLLLLVVVVVVVDDDDDDDDQQQQQQQQQVVVVVVVVVVVVVVDDDDDDDDVVVVVVVVVVVVVVRRRRRRRRRRRRRRRRRRRRRREEEEEEEEEAAAAAEEEEEEEEEGGGGCCCCCCDDDDDDDDCCCCCCLLLLLLLLQQQQQQQQQGGGGFFFFFFFFFFFQQQQQQQQQIIIIIIIITTTTTTTHHHHHHHHHHSSSSSSLLLLLLLLGGGGGGGGGGGGTTTTTTTGGGGAAAAAGGGGMMMMMMMMGGGGTTTTTTTLLLLLLLLLLLLLLLLIIIIIIIISSSSSSKKKKKKKKKIIIIIIIIRRRRRRRRRRREEEEEEEEEEEEEEEEEEFFFFFFFFFFFPPPPPPPDDDDDDDDRRRRRRRRRRRMMMMMMMMMMMMMMMMAAAAATTTTTTTFFFFFFFFFFFSSSSSSVVVVVVVMMMMMMMMPPPPPPPSSSSSSPPPPPPPKKKKKKKKKVVVVVVVSSSSSSDDDDDDDDTTTTTTTVVVVVVVVVVVVVVEEEEEEEEEPPPPPPPYYYYYYYYYYYYNNNNNNNNAAAAATTTTTTTLLLLLLLLSSSSSSVVVVVVVHHHHHHHHHHQQQQQQQQQLLLLLLLLVVVVVVVEEEEEEEEEHHHHHHHHHHSSSSSSDDDDDDDDEEEEEEEEETTTTTTTFFFFFFFFFFFCCCCCCIIIIIIIIDDDDDDDDNNNNNNNNEEEEEEEEEAAAAALLLLLLLLYYYYYYYYYYYYDDDDDDDDIIIIIIIICCCCCCMMMMMMMMRRRRRRRRRRRTTTTTTTLLLLLLLLKKKKKKKKKLLLLLLLLSSSSSSNNNNNNNNPPPPPPPSSSSSSYYYYYYYYYYYYGGGGDDDDDDDDLLLLLLLLNNNNNNNNHHHHHHHHHHLLLLLLLLVVVVVVVSSSSSSAAAAAVVVVVVVMMMMMMMMSSSSSSGGGGVVVVVVVTTTTTTTTTTTTTTCCCCCCLLLLLLLLRRRRRRRRRRRFFFFFFFFFFFPPPPPPPGGGGQQQQQQQQQLLLLLLLLNNNNNNNNSSSSSSDDDDDDDDLLLLLLLLRRRRRRRRRRRKKKKKKKKKLLLLLLLLAAAAAVVVVVVVNNNNNNNNMMMMMMMMVVVVVVVPPPPPPPFFFFFFFFFFFPPPPPPPRRRRRRRRRRRLLLLLLLLHHHHHHHHHHFFFFFFFFFFFFFFFFFFFFFFMMMMMMMMVVVVVVVGGGGFFFFFFFFFFFAAAAAPPPPPPPLLLLLLLLTTTTTTTSSSSSSRRRRRRRRRRRGGGGAAAAAHHHHHHHHHHSSSSSSFFFFFFFFFFFRRRRRRRRRRRAAAAAVVVVVVVSSSSSSVVVVVVVPPPPPPPEEEEEEEEELLLLLLLLTTTTTTTQQQQQQQQQQQQQQQQQQMMMMMMMMFFFFFFFFFFFDDDDDDDDPPPPPPPKKKKKKKKKNNNNNNNNMMMMMMMMMMMMMMMMAAAAAAAAAASSSSSSDDDDDDDDFFFFFFFFFFFRRRRRRRRRRRNNNNNNNNGGGGRRRRRRRRRRRYYYYYYYYYYYYLLLLLLLLTTTTTTTCCCCCCSSSSSSAAAAAIIIIIIIIFFFFFFFFFFFRRRRRRRRRRRGGGGKKKKKKKKKVVVVVVVSSSSSSMMMMMMMMKKKKKKKKKEEEEEEEEEVVVVVVVEEEEEEEEEDDDDDDDDQQQQQQQQQMMMMMMMMRRRRRRRRRRRNNNNNNNNIIIIIIIIQQQQQQQQQSSSSSSKKKKKKKKKNNNNNNNNQQQQQQQQQTTTTTTTYYYYYYYYYYYYFFFFFFFFFFFVVVVVVVEEEEEEEEEWWWWWWWWWWWWWWIIIIIIIIPPPPPPPNNNNNNNNNNNNNNNNIIIIIIIIQQQQQQQQQTTTTTTTAAAAALLLLLLLLCCCCCCSSSSSSIIIIIIIIPPPPPPPPPPPPPPRRRRRRRRRRRGGGGLLLLLLLLKKKKKKKKKMMMMMMMMSSSSSSSSSSSSTTTTTTTFFFFFFFFFFFIIIIIIIIGGGGNNNNNNNNSSSSSSTTTTTTTSSSSSSIIIIIIIIQQQQQQQQQEEEEEEEEELLLLLLLLFFFFFFFFFFFKKKKKKKKKRRRRRRRRRRRVVVVVVVGGGGDDDDDDDDQQQQQQQQQFFFFFFFFFFFTTTTTTTAAAAAMMMMMMMMFFFFFFFFFFFRRRRRRRRRRRRRRRRRRRRRRKKKKKKKKKAAAAAFFFFFFFFFFFLLLLLLLLHHHHHHHHHHWWWWWWWWWWWWWWYYYYYYYYYYYYTTTTTTTGGGGEEEEEEEEEGGGGMMMMMMMMDDDDDDDDEEEEEEEEEMMMMMMMMEEEEEEEEEFFFFFFFFFFFTTTTTTTEEEEEEEEEAAAAAEEEEEEEEESSSSSSNNNNNNNNMMMMMMMMNNNNNNNNDDDDDDDDLLLLLLLLVVVVVVVSSSSSSEEEEEEEEEYYYYYYYYYYYYQQQQQQQQQQQQQQQQQQYYYYYYYYYYYYQQQQQQQQQDDDDDDDDAAAAASSSSSSIIIIIIIISSSSSSEEEEEEEEEGGGGEEEEEEEEEEEEEEEEEEEEEEEEEEEYYYYYYYYYYYYLLLLLLLLEEEEEEEEEEEEEEEEEEEEEEEEEEEEEEEEEEEEPPPPPPPLLLLLLLLEEEEEEEEEHHHHHHHHHHEEEEEEEEEEEEEEEEEEE

SEQ ID NO: 205 - protein, 3461 aa, Babesia bovis
MMMMMMMMRRRRRRRRRRREEEEEEEEEIIIIIIIIVVVVVVVHHHHHHHHHHIIIIIIIIQQQQQQQQQAAAAAGGGGQQQQQQQQQCCCCCCGGGGNNNNNNNNQQQQQQQQQIIIIIIIIGGGGAAAAAKKKKKKKKKFFFFFFFFFFFWWWWWWWWWWWWWWEEEEEEEEEVVVVVVVIIIIIIIISSSSSSDDDDDDDDEEEEEEEEEHHHHHHHHHHGGGGIIIIIIIIDDDDDDDDQQQQQQQQQSSSSSSGGGGTTTTTTTYYYYYYYYYYYYHHHHHHHHHHGGGGDDDDDDDDSSSSSSDDDDDDDDLLLLLLLLQQQQQQQQQLLLLLLLLEEEEEEEEERRRRRRRRRRRIIIIIIIIDDDDDDDDVVVVVVVFFFFFFFFFFFYYYYYYYYYYYYNNNNNNNNEEEEEEEEEAAAAATTTTTTTGGGGGGGGRRRRRRRRRRRYYYYYYYYYYYYVVVVVVVPPPPPPPRRRRRRRRRRRAAAAAVVVVVVVLLLLLLLLMMMMMMMMDDDDDDDDLLLLLLLLEEEEEEEEEPPPPPPPGGGGTTTTTTTMMMMMMMMDDDDDDDDSSSSSSVVVVVVVRRRRRRRRRRRAAAAAGGGGPPPPPPPFFFFFFFFFFFGGGGQQQQQQQQQLLLLLLLLFFFFFFFFFFFRRRRRRRRRRRPPPPPPPDDDDDDDDNNNNNNNNFFFFFFFFFFFVVVVVVVFFFFFFFFFFFGGGGQQQQQQQQQTTTTTTTGGGGAAAAAGGGGNNNNNNNNNNNNNNNNWWWWWWWWWWWWWWAAAAAKKKKKKKKKGGGGHHHHHHHHHHYYYYYYYYYYYYTTTTTTTEEEEEEEEEGGGGAAAAAEEEEEEEEELLLLLLLLIIIIIIIIDDDDDDDDSSSSSSVVVVVVVLLLLLLLLDDDDDDDDVVVVVVVVVVVVVVRRRRRRRRRRRKKKKKKKKKEEEEEEEEEAAAAAEEEEEEEEEGGGGCCCCCCDDDDDDDDCCCCCCLLLLLLLLQQQQQQQQQGGGGFFFFFFFFFFFQQQQQQQQQIIIIIIIITTTTTTTHHHHHHHHHHSSSSSSLLLLLLLLGGGGGGGGGGGGTTTTTTTGGGGSSSSSSGGGGMMMMMMMMGGGGTTTTTTTLLLLLLLLLLLLLLLLIIIIIIIISSSSSSKKKKKKKKKIIIIIIIIRRRRRRRRRRREEEEEEEEEEEEEEEEEEYYYYYYYYYYYYPPPPPPPDDDDDDDDRRRRRRRRRRRIIIIIIIIMMMMMMMMEEEEEEEEETTTTTTTFFFFFFFFFFFSSSSSSVVVVVVVFFFFFFFFFFFPPPPPPPSSSSSSPPPPPPPKKKKKKKKKVVVVVVVSSSSSSDDDDDDDDTTTTTTTVVVVVVVVVVVVVVEEEEEEEEEPPPPPPPYYYYYYYYYYYYNNNNNNNNAAAAATTTTTTTLLLLLLLLSSSSSSVVVVVVVHHHHHHHHHHQQQQQQQQQLLLLLLLLVVVVVVVEEEEEEEEENNNNNNNNAAAAADDDDDDDDEEEEEEEEEVVVVVVVQQQQQQQQQVVVVVVVIIIIIIIIDDDDDDDDNNNNNNNNEEEEEEEEEAAAAALLLLLLLLYYYYYYYYYYYYDDDDDDDDIIIIIIIICCCCCCFFFFFFFFFFFRRRRRRRRRRRTTTTTTTLLLLLLLLKKKKKKKKKLLLLLLLLTTTTTTTTTTTTTTPPPPPPPTTTTTTTYYYYYYYYYYYYGGGGDDDDDDDDLLLLLLLLNNNNNNNNHHHHHHHHHHLLLLLLLLVVVVVVVSSSSSSAAAAAAAAAAMMMMMMMMSSSSSSGGGGVVVVVVVTTTTTTTCCCCCCSSSSSSLLLLLLLLRRRRRRRRRRRFFFFFFFFFFFPPPPPPPGGGGQQQQQQQQQLLLLLLLLNNNNNNNNSSSSSSDDDDDDDDLLLLLLLLRRRRRRRRRRRKKKKKKKKKLLLLLLLLAAAAAVVVVVVVNNNNNNNNLLLLLLLLIIIIIIIIPPPPPPPFFFFFFFFFFFPPPPPPPRRRRRRRRRRRLLLLLLLLHHHHHHHHHHFFFFFFFFFFFFFFFFFFFFFFMMMMMMMMIIIIIIIIGGGGFFFFFFFFFFFAAAAAPPPPPPPLLLLLLLLTTTTTTTSSSSSSRRRRRRRRRRRGGGGSSSSSSQQQQQQQQQQQQQQQQQQHHHHHHHHHHRRRRRRRRRRRAAAAALLLLLLLLSSSSSSVVVVVVVAAAAAEEEEEEEEELLLLLLLLTTTTTTTQQQQQQQQQQQQQQQQQQMMMMMMMMFFFFFFFFFFFDDDDDDDDAAAAAKKKKKKKKKNNNNNNNNMMMMMMMMMMMMMMMMCCCCCCAAAAASSSSSSDDDDDDDDPPPPPPPRRRRRRRRRRRRRRRRRRRRRRGGGGRRRRRRRRRRRYYYYYYYYYYYYLLLLLLLLTTTTTTTAAAAACCCCCCAAAAAMMMMMMMMFFFFFFFFFFFRRRRRRRRRRRGGGGRRRRRRRRRRRMMMMMMMMSSSSSSTTTTTTTKKKKKKKKKEEEEEEEEEVVVVVVVDDDDDDDDEEEEEEEEEQQQQQQQQQMMMMMMMMSSSSSSMMMMMMMMVVVVVVVQQQQQQQQQNNNNNNNNKKKKKKKKKNNNNNNNNSSSSSSSSSSSSYYYYYYYYYYYYFFFFFFFFFFFVVVVVVVEEEEEEEEEWWWWWWWWWWWWWWIIIIIIIIPPPPPPPHHHHHHHHHHNNNNNNNNTTTTTTTKKKKKKKKKSSSSSSSSSSSSVVVVVVVCCCCCCDDDDDDDDIIIIIIIIPPPPPPPPPPPPPPKKKKKKKKKGGGGLLLLLLLLKKKKKKKKKMMMMMMMMAAAAAVVVVVVVTTTTTTTFFFFFFFFFFFVVVVVVVGGGGNNNNNNNNSSSSSSTTTTTTTAAAAAIIIIIIIIQQQQQQQQQDDDDDDDDMMMMMMMMFFFFFFFFFFFKKKKKKKKKRRRRRRRRRRRVVVVVVVSSSSSSEEEEEEEEEQQQQQQQQQFFFFFFFFFFFTTTTTTTAAAAAMMMMMMMMFFFFFFFFFFFRRRRRRRRRRRRRRRRRRRRRRKKKKKKKKKAAAAAFFFFFFFFFFFLLLLLLLLHHHHHHHHHHWWWWWWWWWWWWWWYYYYYYYYYYYYTTTTTTTGGGGEEEEEEEEEGGGGMMMMMMMMDDDDDDDDEEEEEEEEEMMMMMMMMEEEEEEEEEFFFFFFFFFFFTTTTTTTEEEEEEEEEAAAAAEEEEEEEEESSSSSSNNNNNNNNMMMMMMMMNNNNNNNNDDDDDDDDLLLLLLLLVVVVVVVSSSSSSEEEEEEEEEYYYYYYYYYYYYQQQQQQQQQQQQQQQQQQYYYYYYYYYYYYQQQQQQQQQEEEEEEEEEAAAAATTTTTTTIIIIIIIIDDDDDDDDDDDDDDDDDDDDDDDDAAAAADDDDDDDDDDDDDDDDMMMMMMMMVVVVVVVNNNNNNNNDDDDDDDDYYYYYYYYYYYYY

SEQ ID NO: 206 - protein, 3531 aa, Bombyx mori
MMMMMMMMRRRRRRRRRRREEEEEEEEEIIIIIIIIVVVVVVVHHHHHHHHHHVVVVVVVQQQQQQQQQVVVVVVVGGGGRRRRRRRRRRRCCCCCCGGGGNNNNNNNNQQQQQQQQQIIIIIIIIGGGGSSSSSSKKKKKKKKKFFFFFFFFFFFWWWWWWWWWWWWWWEEEEEEEEEVVVVVVVIIIIIIIISSSSSSDDDDDDDDEEEEEEEEEHHHHHHHHHHGGGGIIIIIIIIDDDDDDDDPPPPPPPCCCCCCGGGGRRRRRRRRRRRYYYYYYYYYYYYHHHHHHHHHHGGGGDDDDDDDDSSSSSSDDDDDDDDLLLLLLLLQQQQQQQQQLLLLLLLLEEEEEEEEERRRRRRRRRRRIIIIIIIINNNNNNNNVVVVVVVYYYYYYYYYYYYYYYYYYYYYYYYNNNNNNNNEEEEEEEEEAAAAAFFFFFFFFFFFGGGGAAAAAKKKKKKKKKYYYYYYYYYYYYVVVVVVVPPPPPPPRRRRRRRRRRRAAAAAVVVVVVVLLLLLLLLVVVVVVVDDDDDDDDLLLLLLLLEEEEEEEEEPPPPPPPSSSSSSTTTTTTTMMMMMMMMDDDDDDDDSSSSSSIIIIIIIIRRRRRRRRRRRGGGGGGGGPPPPPPPYYYYYYYYYYYYGGGGSSSSSSLLLLLLLLYYYYYYYYYYYYRRRRRRRRRRRPPPPPPPDDDDDDDDNNNNNNNNVVVVVVVVVVVVVVCCCCCCGGGGAAAAASSSSSSGGGGAAAAAGGGGNNNNNNNNNNNNNNNNWWWWWWWWWWWWWWAAAAAKKKKKKKKKGGGGHHHHHHHHHHYYYYYYYYYYYYTTTTTTTEEEEEEEEEGGGGAAAAADDDDDDDDLLLLLLLLLLLLLLLLEEEEEEEEETTTTTTTVVVVVVVLLLLLLLLDDDDDDDDVVVVVVVVVVVVVVRRRRRRRRRRRKKKKKKKKKEEEEEEEEEAAAAAEEEEEEEEEGGGGCCCCCCDDDDDDDDCCCCCCLLLLLLLLQQQQQQQQQGGGGFFFFFFFFFFFQQQQQQQQQLLLLLLLLVVVVVVVHHHHHHHHHHSSSSSSLLLLLLLLGGGGGGGGGGGGTTTTTTTGGGGSSSSSSGGGGMMMMMMMMGGGGTTTTTTTLLLLLLLLLLLLLLLLLLLLLLLLAAAAANNNNNNNNLLLLLLLLTTTTTTTDDDDDDDDEEEEEEEEEYYYYYYYYYYYYPPPPPPPDDDDDDDDRRRRRRRRRRRIIIIIIIITTTTTTTAAAAATTTTTTTYYYYYYYYYYYYSSSSSSVVVVVVVVVVVVVVPPPPPPPSSSSSSPPPPPPPTTTTTTTVVVVVVVSSSSSSEEEEEEEEETTTTTTTVVVVVVVVVVVVVVEEEEEEEEEPPPPPPPYYYYYYYYYYYYNNNNNNNNAAAAATTTTTTTLLLLLLLLSSSSSSVVVVVVVNNNNNNNNQQQQQQQQQLLLLLLLLIIIIIIIIEEEEEEEEENNNNNNNNSSSSSSIIIIIIIIQQQQQQQQQSSSSSSYYYYYYYYYYYYCCCCCCIIIIIIIIDDDDDDDDNNNNNNNNEEEEEEEEEAAAAALLLLLLLLYYYYYYYYYYYYYYYYYYYYYYYYIIIIIIIICCCCCCHHHHHHHHHHRRRRRRRRRRRTTTTTTTLLLLLLLLKKKKKKKKKLLLLLLLLMMMMMMMMAAAAAPPPPPPPTTTTTTTYYYYYYYYYYYYGGGGAAAAALLLLLLLLNNNNNNNNHHHHHHHHHHLLLLLLLLVVVVVVVSSSSSSLLLLLLLLTTTTTTTMMMMMMMMSSSSSSGGGGVVVVVVVTTTTTTTTTTTTTTCCCCCCLLLLLLLLRRRRRRRRRRRFFFFFFFFFFFPPPPPPPGGGGQQQQQQQQQLLLLLLLLNNNNNNNNAAAAADDDDDDDDLLLLLLLLRRRRRRRRRRRKKKKKKKKKLLLLLLLLAAAAAVVVVVVVNNNNNNNNMMMMMMMMIIIIIIIIPPPPPPPFFFFFFFFFFFPPPPPPPRRRRRRRRRRRLLLLLLLLHHHHHHHHHHFFFFFFFFFFFFFFFFFFFFFFMMMMMMMMPPPPPPPGGGGFFFFFFFFFFFAAAAAPPPPPPPLLLLLLLLTTTTTTTSSSSSSRRRRRRRRRRRGGGGSSSSSSQQQQQQQQQQQQQQQQQQYYYYYYYYYYYYRRRRRRRRRRRAAAAALLLLLLLLTTTTTTTVVVVVVVPPPPPPPEEEEEEEEELLLLLLLLTTTTTTTQQQQQQQQQQQQQQQQQQMMMMMMMMFFFFFFFFFFFDDDDDDDDAAAAAKKKKKKKKKNNNNNNNNMMMMMMMMMMMMMMMMAAAAAAAAAACCCCCCDDDDDDDDPPPPPPPHHHHHHHHHHRRRRRRRRRRRGGGGRRRRRRRRRRRYYYYYYYYYYYYLLLLLLLLTTTTTTTVVVVVVVAAAAATTTTTTTVVVVVVVFFFFFFFFFFFRRRRRRRRRRRGGGGRRRRRRRRRRRMMMMMMMMSSSSSSMMMMMMMMKKKKKKKKKEEEEEEEEEIIIIIIIIDDDDDDDDEEEEEEEEEQQQQQQQQQIIIIIIIILLLLLLLLNNNNNNNNVVVVVVVQQQQQQQQQKKKKKKKKKKKKKKKKKKNNNNNNNNKKKKKKKKKDDDDDDDDFFFFFFFFFFFFFFFFFFFFFFVVVVVVVEEEEEEEEEWWWWWWWWWWWWWWIIIIIIIIPPPPPPPNNNNNNNNNNNNNNNNVVVVVVVQQQQQQQQQTTTTTTTAAAAAVVVVVVVCCCCCCDDDDDDDDIIIIIIIIPPPPPPPPPPPPPPRRRRRRRRRRRGGGGMMMMMMMMKKKKKKKKKMMMMMMMMSSSSSSAAAAATTTTTTTFFFFFFFFFFFIIIIIIIIGGGGNNNNNNNNTTTTTTTTTTTTTTAAAAAIIIIIIIIQQQQQQQQQEEEEEEEEEIIIIIIIIFFFFFFFFFFFKKKKKKKKKRRRRRRRRRRRIIIIIIIISSSSSSEEEEEEEEEQQQQQQQQQFFFFFFFFFFFAAAAAAAAAAMMMMMMMMFFFFFFFFFFFSSSSSSRRRRRRRRRRRKKKKKKKKKAAAAAFFFFFFFFFFFLLLLLLLLHHHHHHHHHHWWWWWWWWWWWWWWYYYYYYYYYYYYTTTTTTTGGGGEEEEEEEEEGGGGMMMMMMMMEEEEEEEEEEEEEEEEEEGGGGDDDDDDDDFFFFFFFFFFFAAAAAEEEEEEEEEAAAAADDDDDDDDNNNNNNNNNNNNNNNNVVVVVVVSSSSSSDDDDDDDDLLLLLLLLLLLLLLLLSSSSSSEEEEEEEEEYYYYYYYYYYYYQQQQQQQQQQQQQQQQQQYYYYYYYYYYYYQQQQQQQQQDDDDDDDDAAAAATTTTTTTIIIIIIIIDDDDDDDDQQQQQQQQQEEEEEEEEEFFFFFFFFFFFEEEEEEEEEDDDDDDDDEEEEEEEEEEEEEEEEEEEEEEEEEEEVVVVVVVEEEEEEEEEEEEEEEEEEQQQQQQQQQNNNNNNNNDDDDDDDDDDDDDDDDSSSSSSDDDDDDDDEEEEEEEEEQQQQQQQQQQ

SEQ ID NO: 207 - protein, 3491 aa, Botryotinia fuckeliana
MMMMMMMMRRRRRRRRRRREEEEEEEEEIIIIIIIIVVVVVVVHHHHHHHHHHLLLLLLLLQQQQQQQQQTTTTTTTGGGGQQQQQQQQQCCCCCCGGGGNNNNNNNNQQQQQQQQQIIIIIIIIGGGGAAAAAAAAAAFFFFFFFFFFFWWWWWWWWWWWWWWQQQQQQQQQTTTTTTTIIIIIIIISSSSSSGGGGEEEEEEEEEHHHHHHHHHHGGGGLLLLLLLLDDDDDDDDGGGGSSSSSSGGGGVVVVVVVYYYYYYYYYYYYNNNNNNNNGGGGTTTTTTTSSSSSSDDDDDDDDLLLLLLLLQQQQQQQQQLLLLLLLLEEEEEEEEERRRRRRRRRRRMMMMMMMMNNNNNNNNVVVVVVVYYYYYYYYYYYYFFFFFFFFFFFNNNNNNNNEEEEEEEEEAAAAASSSSSSGGGGNNNNNNNNKKKKKKKKKYYYYYYYYYYYYVVVVVVVPPPPPPPRRRRRRRRRRRAAAAAVVVVVVVLLLLLLLLVVVVVVVDDDDDDDDLLLLLLLLEEEEEEEEEPPPPPPPGGGGTTTTTTTMMMMMMMMDDDDDDDDAAAAAVVVVVVVRRRRRRRRRRRAAAAAGGGGPPPPPPPFFFFFFFFFFFGGGGQQQQQQQQQLLLLLLLLFFFFFFFFFFFRRRRRRRRRRRPPPPPPPDDDDDDDDNNNNNNNNFFFFFFFFFFFVVVVVVVFFFFFFFFFFFGGGGQQQQQQQQQSSSSSSGGGGAAAAAGGGGNNNNNNNNNNNNNNNNWWWWWWWWWWWWWWAAAAAKKKKKKKKKGGGGHHHHHHHHHHYYYYYYYYYYYYTTTTTTTEEEEEEEEEGGGGAAAAAEEEEEEEEELLLLLLLLVVVVVVVDDDDDDDDQQQQQQQQQVVVVVVVLLLLLLLLDDDDDDDDVVVVVVVVVVVVVVRRRRRRRRRRRRRRRRRRRRRREEEEEEEEEAAAAAEEEEEEEEEGGGGCCCCCCDDDDDDDDCCCCCCLLLLLLLLQQQQQQQQQGGGGFFFFFFFFFFFQQQQQQQQQIIIIIIIITTTTTTTHHHHHHHHHHSSSSSSLLLLLLLLGGGGGGGGGGGGTTTTTTTGGGGAAAAAGGGGMMMMMMMMGGGGTTTTTTTLLLLLLLLLLLLLLLLIIIIIIIISSSSSSKKKKKKKKKIIIIIIIIRRRRRRRRRRREEEEEEEEEEEEEEEEEEFFFFFFFFFFFPPPPPPPDDDDDDDDRRRRRRRRRRRMMMMMMMMMMMMMMMMAAAAATTTTTTTFFFFFFFFFFFSSSSSSVVVVVVVVVVVVVVPPPPPPPSSSSSSPPPPPPPKKKKKKKKKVVVVVVVSSSSSSDDDDDDDDTTTTTTTVVVVVVVVVVVVVVEEEEEEEEEPPPPPPPYYYYYYYYYYYYNNNNNNNNAAAAATTTTTTTLLLLLLLLSSSSSSVVVVVVVHHHHHHHHHHQQQQQQQQQLLLLLLLLVVVVVVVEEEEEEEEENNNNNNNNSSSSSSDDDDDDDDEEEEEEEEETTTTTTTFFFFFFFFFFFCCCCCCIIIIIIIIDDDDDDDDNNNNNNNNEEEEEEEEEAAAAALLLLLLLLYYYYYYYYYYYYDDDDDDDDIIIIIIIICCCCCCMMMMMMMMRRRRRRRRRRRTTTTTTTLLLLLLLLKKKKKKKKKLLLLLLLLSSSSSSNNNNNNNNPPPPPPPSSSSSSYYYYYYYYYYYYGGGGDDDDDDDDLLLLLLLLNNNNNNNNHHHHHHHHHHLLLLLLLLVVVVVVVSSSSSSAAAAAVVVVVVVMMMMMMMMSSSSSSGGGGVVVVVVVTTTTTTTTTTTTTTCCCCCCLLLLLLLLRRRRRRRRRRRFFFFFFFFFFFPPPPPPPGGGGQQQQQQQQQLLLLLLLLNNNNNNNNSSSSSSDDDDDDDDLLLLLLLLRRRRRRRRRRRKKKKKKKKKLLLLLLLLAAAAAVVVVVVVNNNNNNNNMMMMMMMMVVVVVVVPPPPPPPFFFFFFFFFFFPPPPPPPRRRRRRRRRRRLLLLLLLLHHHHHHHHHHFFFFFFFFFFFFFFFFFFFFFFMMMMMMMMVVVVVVVGGGGFFFFFFFFFFFAAAAAPPPPPPPLLLLLLLLTTTTTTTSSSSSSRRRRRRRRRRRGGGGAAAAAHHHHHHHHHHSSSSSSFFFFFFFFFFFRRRRRRRRRRRAAAAAVVVVVVVTTTTTTTVVVVVVVPPPPPPPEEEEEEEEELLLLLLLLTTTTTTTQQQQQQQQQQQQQQQQQQMMMMMMMMYYYYYYYYYYYYDDDDDDDDPPPPPPPKKKKKKKKKNNNNNNNNMMMMMMMMMMMMMMMMAAAAAAAAAASSSSSSDDDDDDDDFFFFFFFFFFFRRRRRRRRRRRNNNNNNNNGGGGRRRRRRRRRRRYYYYYYYYYYYYLLLLLLLLTTTTTTTCCCCCCSSSSSSAAAAAIIIIIIIIFFFFFFFFFFFRRRRRRRRRRRGGGGKKKKKKKKKVVVVVVVSSSSSSMMMMMMMMKKKKKKKKKEEEEEEEEEVVVVVVVEEEEEEEEEDDDDDDDDQQQQQQQQQMMMMMMMMRRRRRRRRRRRNNNNNNNNVVVVVVVQQQQQQQQQNNNNNNNNKKKKKKKKKNNNNNNNNSSSSSSSSSSSSYYYYYYYYYYYYFFFFFFFFFFFVVVVVVVEEEEEEEEEWWWWWWWWWWWWWWIIIIIIIIPPPPPPPNNNNNNNNNNNNNNNNVVVVVVVQQQQQQQQQTTTTTTTAAAAALLLLLLLLCCCCCCSSSSSSIIIIIIIIPPPPPPPPPPPPPPRRRRRRRRRRRGGGGLLLLLLLLKKKKKKKKKMMMMMMMMSSSSSSSSSSSSTTTTTTTFFFFFFFFFFFVVVVVVVGGGGNNNNNNNNSSSSSSTTTTTTTSSSSSSIIIIIIIIQQQQQQQQQEEEEEEEEELLLLLLLLFFFFFFFFFFFKKKKKKKKKRRRRRRRRRRRVVVVVVVGGGGDDDDDDDDQQQQQQQQQFFFFFFFFFFFTTTTTTTAAAAAMMMMMMMMFFFFFFFFFFFRRRRRRRRRRRRRRRRRRRRRRKKKKKKKKKAAAAAFFFFFFFFFFFLLLLLLLLHHHHHHHHHHWWWWWWWWWWWWWWYYYYYYYYYYYYTTTTTTTGGGGEEEEEEEEEGGGGMMMMMMMMDDDDDDDDEEEEEEEEEMMMMMMMMEEEEEEEEEFFFFFFFFFFFTTTTTTTEEEEEEEEEAAAAAEEEEEEEEESSSSSSNNNNNNNNMMMMMMMMNNNNNNNNDDDDDDDDLLLLLLLLVVVVVVVSSSSSSEEEEEEEEEYYYYYYYYYYYYQQQQQQQQQQQQQQQQQQYYYYYYYYYYYYQQQQQQQQQDDDDDDDDAAAAASSSSSSIIIIIIIISSSSSSEEEEEEEEEGGGGEEEEEEEEEEEEEEEEEEEEEEEEEEEYYYYYYYYYYYYEEEEEEEEEEEEEEEEEEEEEEEEEEEVVVVVVVPPPPPPPIIIIIIIIEEEEEEEEEGGGGEEEEEEEEEEEEEEEEEEE

SEQ ID NO: 208 - protein, 3505 aa, Candida albicans
MMMMMMMMRRRRRRRRRRREEEEEEEEEIIIIIIIIIIIIIIIIHHHHHHHHHHLLLLLLLLSSSSSSTTTTTTTGGGGQQQQQQQQQCCCCCCGGGGNNNNNNNNQQQQQQQQQIIIIIIIIGGGGAAAAAAAAAAFFFFFFFFFFFWWWWWWWWWWWWWWEEEEEEEEETTTTTTTIIIIIIIICCCCCCGGGGEEEEEEEEEHHHHHHHHHHGGGGLLLLLLLLDDDDDDDDNNNNNNNNNNNNNNNNGGGGTTTTTTTYYYYYYYYYYYYVVVVVVVGGGGNNNNNNNNNNNNNNNNEEEEEEEEELLLLLLLLQQQQQQQQQKKKKKKKKKSSSSSSKKKKKKKKKLLLLLLLLDDDDDDDDVVVVVVVYYYYYYYYYYYYFFFFFFFFFFFNNNNNNNNEEEEEEEEEAAAAATTTTTTTSSSSSSGGGGKKKKKKKKKYYYYYYYYYYYYVVVVVVVPPPPPPPRRRRRRRRRRRAAAAAVVVVVVVLLLLLLLLVVVVVVVDDDDDDDDLLLLLLLLEEEEEEEEEPPPPPPPGGGGTTTTTTTIIIIIIIIDDDDDDDDNNNNNNNNVVVVVVVKKKKKKKKKTTTTTTTSSSSSSQQQQQQQQQIIIIIIIIGGGGNNNNNNNNLLLLLLLLFFFFFFFFFFFRRRRRRRRRRRPPPPPPPDDDDDDDDNNNNNNNNFFFFFFFFFFFIIIIIIIIFFFFFFFFFFFGGGGQQQQQQQQQSSSSSSSSSSSSAAAAAGGGGNNNNNNNNVVVVVVVWWWWWWWWWWWWWWAAAAAKKKKKKKKKGGGGHHHHHHHHHHYYYYYYYYYYYYTTTTTTTEEEEEEEEEGGGGAAAAAEEEEEEEEELLLLLLLLVVVVVVVDDDDDDDDSSSSSSVVVVVVVLLLLLLLLDDDDDDDDVVVVVVVVVVVVVVRRRRRRRRRRRRRRRRRRRRRREEEEEEEEEAAAAAEEEEEEEEEGGGGCCCCCCDDDDDDDDSSSSSSLLLLLLLLQQQQQQQQQGGGGFFFFFFFFFFFQQQQQQQQQIIIIIIIITTTTTTTHHHHHHHHHHSSSSSSLLLLLLLLGGGGGGGGGGGGTTTTTTTGGGGSSSSSSGGGGMMMMMMMMGGGGTTTTTTTLLLLLLLLLLLLLLLLIIIIIIIISSSSSSKKKKKKKKKIIIIIIIIRRRRRRRRRRREEEEEEEEEEEEEEEEEEFFFFFFFFFFFPPPPPPPDDDDDDDDTTTTTTTMMMMMMMMMMMMMMMMAAAAATTTTTTTFFFFFFFFFFFSSSSSSVVVVVVVVVVVVVVPPPPPPPSSSSSSPPPPPPPKKKKKKKKKVVVVVVVSSSSSSDDDDDDDDTTTTTTTVVVVVVVIIIIIIIIEEEEEEEEEPPPPPPPYYYYYYYYYYYYNNNNNNNNAAAAATTTTTTTLLLLLLLLSSSSSSVVVVVVVHHHHHHHHHHQQQQQQQQQLLLLLLLLVVVVVVVEEEEEEEEENNNNNNNNSSSSSSDDDDDDDDEEEEEEEEETTTTTTTFFFFFFFFFFFCCCCCCIIIIIIIIDDDDDDDDNNNNNNNNEEEEEEEEEAAAAALLLLLLLLYYYYYYYYYYYYNNNNNNNNIIIIIIIICCCCCCQQQQQQQQQNNNNNNNNTTTTTTTLLLLLLLLKKKKKKKKKLLLLLLLLPPPPPPPQQQQQQQQQPPPPPPPSSSSSSYYYYYYYYYYYYAAAAAEEEEEEEEELLLLLLLLNNNNNNNNNNNNNNNNLLLLLLLLVVVVVVVSSSSSSSSSSSSVVVVVVVMMMMMMMMSSSSSSGGGGVVVVVVVTTTTTTTTTTTTTTSSSSSSLLLLLLLLRRRRRRRRRRRYYYYYYYYYYYYPPPPPPPGGGGQQQQQQQQQLLLLLLLLNNNNNNNNSSSSSSDDDDDDDDLLLLLLLLRRRRRRRRRRRKKKKKKKKKLLLLLLLLAAAAAVVVVVVVNNNNNNNNLLLLLLLLVVVVVVVPPPPPPPFFFFFFFFFFFPPPPPPPRRRRRRRRRRRLLLLLLLLHHHHHHHHHHFFFFFFFFFFFFFFFFFFFFFFMMMMMMMMVVVVVVVGGGGYYYYYYYYYYYYAAAAAPPPPPPPLLLLLLLLTTTTTTTSSSSSSMMMMMMMMGGGGSSSSSSKKKKKKKKKSSSSSSFFFFFFFFFFFRRRRRRRRRRRSSSSSSVVVVVVVTTTTTTTVVVVVVVPPPPPPPEEEEEEEEELLLLLLLLTTTTTTTQQQQQQQQQQQQQQQQQQMMMMMMMMFFFFFFFFFFFDDDDDDDDAAAAAKKKKKKKKKNNNNNNNNMMMMMMMMMMMMMMMMAAAAAAAAAASSSSSSDDDDDDDDPPPPPPPRRRRRRRRRRRNNNNNNNNGGGGRRRRRRRRRRRYYYYYYYYYYYYLLLLLLLLTTTTTTTVVVVVVVAAAAAAAAAAFFFFFFFFFFFFFFFFFFFFFFRRRRRRRRRRRGGGGKKKKKKKKKVVVVVVVSSSSSSVVVVVVVKKKKKKKKKEEEEEEEEEVVVVVVVDDDDDDDDDDDDDDDDEEEEEEEEEMMMMMMMMHHHHHHHHHHKKKKKKKKKIIIIIIIIQQQQQQQQQTTTTTTTRRRRRRRRRRRNNNNNNNNSSSSSSSSSSSSYYYYYYYYYYYYFFFFFFFFFFFVVVVVVVDDDDDDDDWWWWWWWWWWWWWWIIIIIIIIPPPPPPPNNNNNNNNNNNNNNNNVVVVVVVQQQQQQQQQTTTTTTTAAAAAVVVVVVVCCCCCCSSSSSSVVVVVVVPPPPPPPPPPPPPPKKKKKKKKKDDDDDDDDLLLLLLLLDDDDDDDDMMMMMMMMSSSSSSAAAAATTTTTTTFFFFFFFFFFFIIIIIIIIGGGGNNNNNNNNSSSSSSTTTTTTTSSSSSSIIIIIIIIQQQQQQQQQEEEEEEEEELLLLLLLLFFFFFFFFFFFKKKKKKKKKRRRRRRRRRRRVVVVVVVGGGGDDDDDDDDQQQQQQQQQFFFFFFFFFFFSSSSSSAAAAAMMMMMMMMFFFFFFFFFFFRRRRRRRRRRRRRRRRRRRRRRKKKKKKKKKAAAAAFFFFFFFFFFFLLLLLLLLHHHHHHHHHHWWWWWWWWWWWWWWYYYYYYYYYYYYTTTTTTTSSSSSSEEEEEEEEEGGGGMMMMMMMMDDDDDDDDEEEEEEEEEMMMMMMMMEEEEEEEEEFFFFFFFFFFFTTTTTTTEEEEEEEEEAAAAAEEEEEEEEESSSSSSNNNNNNNNMMMMMMMMNNNNNNNNDDDDDDDDLLLLLLLLVVVVVVVSSSSSSEEEEEEEEEYYYYYYYYYYYYQQQQQQQQQQQQQQQQQQYYYYYYYYYYYYQQQQQQQQQEEEEEEEEEAAAAASSSSSSIIIIIIIIDDDDDDDDEEEEEEEEEEEEEEEEEEEEEEEEEEELLLLLLLLEEEEEEEEEYYYYYYYYYYYYAAAAADDDDDDDDEEEEEEEEEIIIIIIIIPPPPPPPLLLLLLLLEEEEEEEEEDDDDDDDDAAAAAAAAAAMMMMMMMMEEEEEEEEEE

SEQ ID NO: 209 - protein, 3498 aa, Acremonium chrysogenum
MMMMMMMMRRRRRRRRRRREEEEEEEEEIIIIIIIIVVVVVVVHHHHHHHHHHLLLLLLLLQQQQQQQQQTTTTTTTGGGGQQQQQQQQQCCCCCCGGGGNNNNNNNNQQQQQQQQQIIIIIIIIGGGGAAAAAAAAAAFFFFFFFFFFFWWWWWWWWWWWWWWQQQQQQQQQTTTTTTTIIIIIIIISSSSSSGGGGEEEEEEEEEHHHHHHHHHHGGGGLLLLLLLLDDDDDDDDSSSSSSNNNNNNNNGGGGVVVVVVVYYYYYYYYYYYYNNNNNNNNGGGGSSSSSSSSSSSSEEEEEEEEELLLLLLLLQQQQQQQQQLLLLLLLLEEEEEEEEERRRRRRRRRRRMMMMMMMMSSSSSSVVVVVVVYYYYYYYYYYYYFFFFFFFFFFFNNNNNNNNEEEEEEEEEAAAAASSSSSSGGGGNNNNNNNNKKKKKKKKKYYYYYYYYYYYYVVVVVVVPPPPPPPRRRRRRRRRRRAAAAAVVVVVVVLLLLLLLLVVVVVVVDDDDDDDDLLLLLLLLEEEEEEEEEPPPPPPPGGGGTTTTTTTMMMMMMMMDDDDDDDDAAAAAVVVVVVVRRRRRRRRRRRAAAAAGGGGPPPPPPPFFFFFFFFFFFGGGGQQQQQQQQQLLLLLLLLFFFFFFFFFFFRRRRRRRRRRRPPPPPPPDDDDDDDDNNNNNNNNFFFFFFFFFFFVVVVVVVFFFFFFFFFFFGGGGQQQQQQQQQSSSSSSGGGGAAAAAGGGGNNNNNNNNNNNNNNNNWWWWWWWWWWWWWWAAAAAKKKKKKKKKGGGGHHHHHHHHHHYYYYYYYYYYYYTTTTTTTEEEEEEEEEGGGGAAAAAEEEEEEEEELLLLLLLLVVVVVVVDDDDDDDDNNNNNNNNVVVVVVVLLLLLLLLDDDDDDDDVVVVVVVVVVVVVVRRRRRRRRRRRRRRRRRRRRRREEEEEEEEEAAAAAEEEEEEEEEGGGGCCCCCCDDDDDDDDCCCCCCLLLLLLLLQQQQQQQQQGGGGFFFFFFFFFFFQQQQQQQQQIIIIIIIITTTTTTTHHHHHHHHHHSSSSSSLLLLLLLLGGGGGGGGGGGGTTTTTTTGGGGAAAAAGGGGMMMMMMMMGGGGTTTTTTTLLLLLLLLLLLLLLLLIIIIIIIISSSSSSKKKKKKKKKIIIIIIIIRRRRRRRRRRREEEEEEEEEEEEEEEEEEFFFFFFFFFFFPPPPPPPDDDDDDDDRRRRRRRRRRRMMMMMMMMMMMMMMMMAAAAATTTTTTTFFFFFFFFFFFSSSSSSVVVVVVVVVVVVVVPPPPPPPSSSSSSPPPPPPPKKKKKKKKKVVVVVVVSSSSSSDDDDDDDDTTTTTTTVVVVVVVVVVVVVVEEEEEEEEEPPPPPPPYYYYYYYYYYYYNNNNNNNNAAAAATTTTTTTLLLLLLLLSSSSSSVVVVVVVHHHHHHHHHHQQQQQQQQQLLLLLLLLVVVVVVVEEEEEEEEEHHHHHHHHHHSSSSSSDDDDDDDDEEEEEEEEETTTTTTTFFFFFFFFFFFCCCCCCIIIIIIIIDDDDDDDDNNNNNNNNEEEEEEEEEAAAAALLLLLLLLYYYYYYYYYYYYDDDDDDDDIIIIIIIICCCCCCMMMMMMMMRRRRRRRRRRRTTTTTTTLLLLLLLLKKKKKKKKKLLLLLLLLSSSSSSNNNNNNNNPPPPPPPSSSSSSYYYYYYYYYYYYGGGGDDDDDDDDLLLLLLLLNNNNNNNNYYYYYYYYYYYYLLLLLLLLVVVVVVVSSSSSSAAAAAVVVVVVVMMMMMMMMSSSSSSGGGGVVVVVVVTTTTTTTTTTTTTTCCCCCCLLLLLLLLRRRRRRRRRRRFFFFFFFFFFFPPPPPPPGGGGQQQQQQQQQLLLLLLLLNNNNNNNNSSSSSSDDDDDDDDLLLLLLLLRRRRRRRRRRRKKKKKKKKKLLLLLLLLAAAAAVVVVVVVNNNNNNNNMMMMMMMMVVVVVVVPPPPPPPFFFFFFFFFFFPPPPPPPRRRRRRRRRRRLLLLLLLLHHHHHHHHHHFFFFFFFFFFFFFFFFFFFFFFMMMMMMMMVVVVVVVGGGGFFFFFFFFFFFAAAAAPPPPPPPLLLLLLLLTTTTTTTSSSSSSRRRRRRRRRRRGGGGAAAAAHHHHHHHHHHSSSSSSFFFFFFFFFFFRRRRRRRRRRRAAAAAVVVVVVVSSSSSSVVVVVVVPPPPPPPEEEEEEEEELLLLLLLLTTTTTTTQQQQQQQQQQQQQQQQQQMMMMMMMMFFFFFFFFFFFDDDDDDDDPPPPPPPKKKKKKKKKNNNNNNNNMMMMMMMMMMMMMMMMAAAAAAAAAASSSSSSDDDDDDDDFFFFFFFFFFFRRRRRRRRRRRNNNNNNNNGGGGRRRRRRRRRRRYYYYYYYYYYYYLLLLLLLLTTTTTTTCCCCCCSSSSSSAAAAAIIIIIIIIFFFFFFFFFFFRRRRRRRRRRRGGGGKKKKKKKKKVVVVVVVAAAAAMMMMMMMMKKKKKKKKKEEEEEEEEEVVVVVVVEEEEEEEEEDDDDDDDDQQQQQQQQQMMMMMMMMRRRRRRRRRRRNNNNNNNNVVVVVVVQQQQQQQQQSSSSSSKKKKKKKKKNNNNNNNNSSSSSSSSSSSSYYYYYYYYYYYYFFFFFFFFFFFVVVVVVVEEEEEEEEEWWWWWWWWWWWWWWIIIIIIIIPPPPPPPNNNNNNNNNNNNNNNNIIIIIIIIQQQQQQQQQTTTTTTTAAAAALLLLLLLLCCCCCCAAAAAIIIIIIIIPPPPPPPPPPPPPPRRRRRRRRRRRGGGGLLLLLLLLKKKKKKKKKMMMMMMMMSSSSSSSSSSSSTTTTTTTFFFFFFFFFFFIIIIIIIIGGGGNNNNNNNNSSSSSSTTTTTTTSSSSSSIIIIIIIIQQQQQQQQQEEEEEEEEELLLLLLLLFFFFFFFFFFFKKKKKKKKKRRRRRRRRRRRVVVVVVVGGGGDDDDDDDDQQQQQQQQQFFFFFFFFFFFTTTTTTTAAAAAMMMMMMMMFFFFFFFFFFFRRRRRRRRRRRRRRRRRRRRRRKKKKKKKKKAAAAAFFFFFFFFFFFLLLLLLLLHHHHHHHHHHWWWWWWWWWWWWWWYYYYYYYYYYYYTTTTTTTGGGGEEEEEEEEEGGGGMMMMMMMMDDDDDDDDEEEEEEEEEMMMMMMMMEEEEEEEEEFFFFFFFFFFFTTTTTTTEEEEEEEEEAAAAAEEEEEEEEESSSSSSNNNNNNNNMMMMMMMMNNNNNNNNDDDDDDDDLLLLLLLLVVVVVVVSSSSSSEEEEEEEEEYYYYYYYYYYYYQQQQQQQQQQQQQQQQQQYYYYYYYYYYYYQQQQQQQQQDDDDDDDDAAAAAGGGGIIIIIIIIDDDDDDDDEEEEEEEEEEEEEEEEEEEEEEEEEEEEEEEEEEEEEEEEEEEEEYYYYYYYYYYYYEEEEEEEEEEEEEEEEEEEEEEEEEEELLLLLLLLPPPPPPPLLLLLLLLEEEEEEEEEGGGGEEEEEEEEEEEEEEEEEEE

SEQ ID NO: 210 - protein, 3475 aa, Chlamydomonas incerta
MMMMMMMMRRRRRRRRRRREEEEEEEEEIIIIIIIIVVVVVVVHHHHHHHHHHIIIIIIIIQQQQQQQQQGGGGGGGGQQQQQQQQQCCCCCCGGGGNNNNNNNNQQQQQQQQQIIIIIIIIGGGGAAAAAKKKKKKKKKFFFFFFFFFFFWWWWWWWWWWWWWWEEEEEEEEEVVVVVVVVVVVVVVSSSSSSDDDDDDDDEEEEEEEEEHHHHHHHHHHGGGGVVVVVVVDDDDDDDDPPPPPPPTTTTTTTGGGGTTTTTTTYYYYYYYYYYYYHHHHHHHHHHGGGGDDDDDDDDSSSSSSDDDDDDDDLLLLLLLLQQQQQQQQQLLLLLLLLEEEEEEEEERRRRRRRRRRRIIIIIIIINNNNNNNNVVVVVVVYYYYYYYYYYYYFFFFFFFFFFFNNNNNNNNEEEEEEEEEAAAAATTTTTTTGGGGGGGGRRRRRRRRRRRYYYYYYYYYYYYVVVVVVVPPPPPPPRRRRRRRRRRRAAAAAIIIIIIIILLLLLLLLMMMMMMMMDDDDDDDDLLLLLLLLEEEEEEEEEPPPPPPPGGGGTTTTTTTMMMMMMMMDDDDDDDDSSSSSSVVVVVVVRRRRRRRRRRRSSSSSSGGGGPPPPPPPYYYYYYYYYYYYGGGGQQQQQQQQQIIIIIIIIFFFFFFFFFFFRRRRRRRRRRRPPPPPPPDDDDDDDDNNNNNNNNFFFFFFFFFFFVVVVVVVFFFFFFFFFFFGGGGQQQQQQQQQTTTTTTTGGGGAAAAAGGGGNNNNNNNNNNNNNNNNWWWWWWWWWWWWWWAAAAAKKKKKKKKKGGGGHHHHHHHHHHYYYYYYYYYYYYTTTTTTTEEEEEEEEEGGGGAAAAAEEEEEEEEELLLLLLLLIIIIIIIIDDDDDDDDSSSSSSVVVVVVVLLLLLLLLDDDDDDDDVVVVVVVVVVVVVVRRRRRRRRRRRKKKKKKKKKEEEEEEEEEAAAAAEEEEEEEEESSSSSSCCCCCCDDDDDDDDCCCCCCLLLLLLLLQQQQQQQQQGGGGFFFFFFFFFFFQQQQQQQQQVVVVVVVCCCCCCHHHHHHHHHHSSSSSSLLLLLLLLGGGGGGGGGGGGTTTTTTTGGGGSSSSSSGGGGMMMMMMMMGGGGTTTTTTTLLLLLLLLLLLLLLLLIIIIIIIISSSSSSKKKKKKKKKIIIIIIIIRRRRRRRRRRREEEEEEEEEEEEEEEEEEYYYYYYYYYYYYPPPPPPPDDDDDDDDRRRRRRRRRRRMMMMMMMMMMMMMMMMLLLLLLLLTTTTTTTFFFFFFFFFFFSSSSSSVVVVVVVVVVVVVVPPPPPPPSSSSSSPPPPPPPKKKKKKKKKVVVVVVVSSSSSSDDDDDDDDTTTTTTTVVVVVVVVVVVVVVEEEEEEEEEPPPPPPPYYYYYYYYYYYYNNNNNNNNAAAAATTTTTTTLLLLLLLLSSSSSSVVVVVVVHHHHHHHHHHQQQQQQQQQLLLLLLLLVVVVVVVEEEEEEEEENNNNNNNNAAAAADDDDDDDDEEEEEEEEECCCCCCMMMMMMMMVVVVVVVLLLLLLLLDDDDDDDDNNNNNNNNEEEEEEEEEAAAAALLLLLLLLYYYYYYYYYYYYDDDDDDDDIIIIIIIICCCCCCFFFFFFFFFFFRRRRRRRRRRRTTTTTTTLLLLLLLLKKKKKKKKKLLLLLLLLTTTTTTTTTTTTTTPPPPPPPTTTTTTTFFFFFFFFFFFGGGGDDDDDDDDLLLLLLLLNNNNNNNNHHHHHHHHHHLLLLLLLLIIIIIIIISSSSSSAAAAAVVVVVVVMMMMMMMMSSSSSSGGGGIIIIIIIITTTTTTTCCCCCCCCCCCCLLLLLLLLRRRRRRRRRRRFFFFFFFFFFFPPPPPPPGGGGQQQQQQQQQLLLLLLLLNNNNNNNNAAAAADDDDDDDDLLLLLLLLRRRRRRRRRRRKKKKKKKKKLLLLLLLLAAAAAVVVVVVVNNNNNNNNLLLLLLLLIIIIIIIIPPPPPPPFFFFFFFFFFFPPPPPPPRRRRRRRRRRRLLLLLLLLHHHHHHHHHHFFFFFFFFFFFFFFFFFFFFFFMMMMMMMMVVVVVVVGGGGFFFFFFFFFFFTTTTTTTPPPPPPPLLLLLLLLTTTTTTTSSSSSSRRRRRRRRRRRGGGGSSSSSSQQQQQQQQQQQQQQQQQQYYYYYYYYYYYYRRRRRRRRRRRAAAAALLLLLLLLTTTTTTTVVVVVVVPPPPPPPEEEEEEEEELLLLLLLLTTTTTTTQQQQQQQQQQQQQQQQQQMMMMMMMMWWWWWWWWWWWWWWDDDDDDDDAAAAAKKKKKKKKKNNNNNNNNMMMMMMMMMMMMMMMMCCCCCCAAAAAAAAAADDDDDDDDPPPPPPPRRRRRRRRRRRHHHHHHHHHHGGGGRRRRRRRRRRRYYYYYYYYYYYYLLLLLLLLTTTTTTTAAAAASSSSSSAAAAALLLLLLLLFFFFFFFFFFFRRRRRRRRRRRGGGGRRRRRRRRRRRMMMMMMMMSSSSSSTTTTTTTKKKKKKKKKEEEEEEEEEVVVVVVVDDDDDDDDEEEEEEEEEQQQQQQQQQMMMMMMMMLLLLLLLLNNNNNNNNVVVVVVVQQQQQQQQQNNNNNNNNKKKKKKKKKNNNNNNNNSSSSSSSSSSSSYYYYYYYYYYYYFFFFFFFFFFFVVVVVVVEEEEEEEEEWWWWWWWWWWWWWWIIIIIIIIPPPPPPPNNNNNNNNNNNNNNNNVVVVVVVKKKKKKKKKSSSSSSSSSSSSVVVVVVVCCCCCCDDDDDDDDIIIIIIIIPPPPPPPPPPPPPPKKKKKKKKKGGGGLLLLLLLLKKKKKKKKKMMMMMMMMSSSSSSAAAAATTTTTTTFFFFFFFFFFFIIIIIIIIGGGGNNNNNNNNSSSSSSTTTTTTTAAAAAIIIIIIIIQQQQQQQQQEEEEEEEEEMMMMMMMMFFFFFFFFFFFKKKKKKKKKRRRRRRRRRRRVVVVVVVSSSSSSEEEEEEEEEQQQQQQQQQFFFFFFFFFFFTTTTTTTAAAAAMMMMMMMMFFFFFFFFFFFRRRRRRRRRRRRRRRRRRRRRRKKKKKKKKKAAAAAFFFFFFFFFFFLLLLLLLLHHHHHHHHHHWWWWWWWWWWWWWWYYYYYYYYYYYYTTTTTTTGGGGEEEEEEEEEGGGGMMMMMMMMDDDDDDDDEEEEEEEEEMMMMMMMMEEEEEEEEEFFFFFFFFFFFTTTTTTTEEEEEEEEEAAAAAEEEEEEEEESSSSSSNNNNNNNNMMMMMMMMNNNNNNNNDDDDDDDDLLLLLLLLVVVVVVVSSSSSSEEEEEEEEEYYYYYYYYYYYYQQQQQQQQQQQQQQQQQQYYYYYYYYYYYYQQQQQQQQQDDDDDDDDAAAAASSSSSSAAAAAEEEEEEEEEEEEEEEEEEEEEEEEEEEGGGGEEEEEEEEEFFFFFFFFFFFEEEEEEEEEGGGGEEEEEEEEEEEEEEEEEEEEEEEEEEEEEEEEEEEEAAAAAA

SEQ ID NO: 211 - protein, 3476 aa, Chlamydomonas reinhardtii
MMMMMMMMRRRRRRRRRRREEEEEEEEEIIIIIIIIVVVVVVVHHHHHHHHHHIIIIIIIIQQQQQQQQQGGGGGGGGQQQQQQQQQCCCCCCGGGGNNNNNNNNQQQQQQQQQIIIIIIIIGGGGAAAAAKKKKKKKKKFFFFFFFFFFFWWWWWWWWWWWWWWEEEEEEEEEVVVVVVVVVVVVVVSSSSSSDDDDDDDDEEEEEEEEEHHHHHHHHHHGGGGIIIIIIIIDDDDDDDDPPPPPPPTTTTTTTGGGGTTTTTTTYYYYYYYYYYYYHHHHHHHHHHGGGGDDDDDDDDSSSSSSDDDDDDDDLLLLLLLLQQQQQQQQQLLLLLLLLEEEEEEEEERRRRRRRRRRRIIIIIIIINNNNNNNNVVVVVVVYYYYYYYYYYYYFFFFFFFFFFFNNNNNNNNEEEEEEEEEAAAAATTTTTTTGGGGGGGGRRRRRRRRRRRYYYYYYYYYYYYVVVVVVVPPPPPPPRRRRRRRRRRRAAAAAIIIIIIIILLLLLLLLMMMMMMMMDDDDDDDDLLLLLLLLEEEEEEEEEPPPPPPPGGGGTTTTTTTMMMMMMMMDDDDDDDDSSSSSSVVVVVVVRRRRRRRRRRRSSSSSSGGGGPPPPPPPYYYYYYYYYYYYGGGGQQQQQQQQQIIIIIIIIFFFFFFFFFFFRRRRRRRRRRRPPPPPPPDDDDDDDDNNNNNNNNFFFFFFFFFFFVVVVVVVFFFFFFFFFFFGGGGQQQQQQQQQTTTTTTTGGGGAAAAAGGGGNNNNNNNNNNNNNNNNWWWWWWWWWWWWWWAAAAAKKKKKKKKKGGGGHHHHHHHHHHYYYYYYYYYYYYTTTTTTTEEEEEEEEEGGGGAAAAAEEEEEEEEELLLLLLLLIIIIIIIIDDDDDDDDSSSSSSVVVVVVVLLLLLLLLDDDDDDDDVVVVVVVVVVVVVVRRRRRRRRRRRKKKKKKKKKEEEEEEEEEAAAAAEEEEEEEEESSSSSSCCCCCCDDDDDDDDCCCCCCLLLLLLLLQQQQQQQQQGGGGFFFFFFFFFFFQQQQQQQQQVVVVVVVCCCCCCHHHHHHHHHHSSSSSSLLLLLLLLGGGGGGGGGGGGTTTTTTTGGGGSSSSSSGGGGMMMMMMMMGGGGTTTTTTTLLLLLLLLLLLLLLLLIIIIIIIISSSSSSKKKKKKKKKIIIIIIIIRRRRRRRRRRREEEEEEEEEEEEEEEEEEYYYYYYYYYYYYPPPPPPPDDDDDDDDRRRRRRRRRRRMMMMMMMMMMMMMMMMLLLLLLLLTTTTTTTFFFFFFFFFFFSSSSSSVVVVVVVVVVVVVVPPPPPPPSSSSSSPPPPPPPKKKKKKKKKVVVVVVVSSSSSSDDDDDDDDTTTTTTTVVVVVVVVVVVVVVEEEEEEEEEPPPPPPPYYYYYYYYYYYYNNNNNNNNAAAAATTTTTTTLLLLLLLLSSSSSSVVVVVVVHHHHHHHHHHQQQQQQQQQLLLLLLLLVVVVVVVEEEEEEEEENNNNNNNNAAAAADDDDDDDDEEEEEEEEECCCCCCMMMMMMMMVVVVVVVLLLLLLLLDDDDDDDDNNNNNNNNEEEEEEEEEAAAAALLLLLLLLYYYYYYYYYYYYDDDDDDDDIIIIIIIICCCCCCFFFFFFFFFFFRRRRRRRRRRRTTTTTTTLLLLLLLLKKKKKKKKKLLLLLLLLTTTTTTTTTTTTTTPPPPPPPTTTTTTTFFFFFFFFFFFGGGGDDDDDDDDLLLLLLLLNNNNNNNNHHHHHHHHHHLLLLLLLLIIIIIIIISSSSSSAAAAAVVVVVVVMMMMMMMMSSSSSSGGGGIIIIIIIITTTTTTTCCCCCCCCCCCCLLLLLLLLRRRRRRRRRRRFFFFFFFFFFFPPPPPPPGGGGQQQQQQQQQLLLLLLLLNNNNNNNNAAAAADDDDDDDDLLLLLLLLRRRRRRRRRRRKKKKKKKKKLLLLLLLLAAAAAVVVVVVVNNNNNNNNLLLLLLLLIIIIIIIIPPPPPPPFFFFFFFFFFFPPPPPPPRRRRRRRRRRRLLLLLLLLHHHHHHHHHHFFFFFFFFFFFFFFFFFFFFFFMMMMMMMMVVVVVVVGGGGFFFFFFFFFFFTTTTTTTPPPPPPPLLLLLLLLTTTTTTTSSSSSSRRRRRRRRRRRGGGGSSSSSSQQQQQQQQQQQQQQQQQQYYYYYYYYYYYYRRRRRRRRRRRAAAAALLLLLLLLTTTTTTTVVVVVVVPPPPPPPEEEEEEEEELLLLLLLLTTTTTTTQQQQQQQQQQQQQQQQQQMMMMMMMMWWWWWWWWWWWWWWDDDDDDDDAAAAAKKKKKKKKKNNNNNNNNMMMMMMMMMMMMMMMMCCCCCCAAAAAAAAAADDDDDDDDPPPPPPPRRRRRRRRRRRHHHHHHHHHHGGGGRRRRRRRRRRRYYYYYYYYYYYYLLLLLLLLTTTTTTTAAAAASSSSSSAAAAALLLLLLLLFFFFFFFFFFFRRRRRRRRRRRGGGGRRRRRRRRRRRMMMMMMMMSSSSSSTTTTTTTKKKKKKKKKEEEEEEEEEVVVVVVVDDDDDDDDEEEEEEEEEQQQQQQQQQMMMMMMMMLLLLLLLLNNNNNNNNVVVVVVVQQQQQQQQQNNNNNNNNKKKKKKKKKNNNNNNNNSSSSSSSSSSSSYYYYYYYYYYYYFFFFFFFFFFFVVVVVVVEEEEEEEEEWWWWWWWWWWWWWWIIIIIIIIPPPPPPPNNNNNNNNNNNNNNNNVVVVVVVKKKKKKKKKSSSSSSSSSSSSVVVVVVVCCCCCCDDDDDDDDIIIIIIIIPPPPPPPPPPPPPPKKKKKKKKKGGGGLLLLLLLLKKKKKKKKKMMMMMMMMSSSSSSAAAAATTTTTTTFFFFFFFFFFFIIIIIIIIGGGGNNNNNNNNSSSSSSTTTTTTTAAAAAIIIIIIIIQQQQQQQQQEEEEEEEEEMMMMMMMMFFFFFFFFFFFKKKKKKKKKRRRRRRRRRRRVVVVVVVSSSSSSEEEEEEEEEQQQQQQQQQFFFFFFFFFFFTTTTTTTAAAAAMMMMMMMMFFFFFFFFFFFRRRRRRRRRRRRRRRRRRRRRRKKKKKKKKKAAAAAFFFFFFFFFFFLLLLLLLLHHHHHHHHHHWWWWWWWWWWWWWWYYYYYYYYYYYYTTTTTTTGGGGEEEEEEEEEGGGGMMMMMMMMDDDDDDDDEEEEEEEEEMMMMMMMMEEEEEEEEEFFFFFFFFFFFTTTTTTTEEEEEEEEEAAAAAEEEEEEEEESSSSSSNNNNNNNNMMMMMMMMNNNNNNNNDDDDDDDDLLLLLLLLVVVVVVVSSSSSSEEEEEEEEEYYYYYYYYYYYYQQQQQQQQQQQQQQQQQQYYYYYYYYYYYYQQQQQQQQQDDDDDDDDAAAAASSSSSSAAAAAEEEEEEEEEEEEEEEEEEEEEEEEEEEGGGGEEEEEEEEEFFFFFFFFFFFEEEEEEEEEGGGGEEEEEEEEEEEEEEEEEEEEEEEEEEEEEEEEEEEEAAAAAA

SEQ ID NO: 212 - protein, 3542 aa, Cicer arietinum
MMMMMMMMRRRRRRRRRRREEEEEEEEEIIIIIIIILLLLLLLLHHHHHHHHHHVVVVVVVQQQQQQQQQGGGGGGGGQQQQQQQQQCCCCCCGGGGNNNNNNNNQQQQQQQQQIIIIIIIIGGGGSSSSSSKKKKKKKKKFFFFFFFFFFFWWWWWWWWWWWWWWEEEEEEEEEVVVVVVVIIIIIIIICCCCCCDDDDDDDDEEEEEEEEEHHHHHHHHHHGGGGIIIIIIIIDDDDDDDDQQQQQQQQQTTTTTTTGGGGKKKKKKKKKYYYYYYYYYYYYIIIIIIIISSSSSSEEEEEEEEEGGGGGGGGSSSSSSDDDDDDDDTTTTTTTQQQQQQQQQLLLLLLLLEEEEEEEEERRRRRRRRRRRIIIIIIIINNNNNNNNVVVVVVVYYYYYYYYYYYYYYYYYYYYYYYYNNNNNNNNEEEEEEEEEAAAAASSSSSSGGGGGGGGRRRRRRRRRRRYYYYYYYYYYYYVVVVVVVPPPPPPPRRRRRRRRRRRAAAAAVVVVVVVLLLLLLLLMMMMMMMMDDDDDDDDLLLLLLLLEEEEEEEEEPPPPPPPGGGGTTTTTTTMMMMMMMMEEEEEEEEESSSSSSIIIIIIIIRRRRRRRRRRRSSSSSSGGGGPPPPPPPFFFFFFFFFFFGGGGKKKKKKKKKIIIIIIIIFFFFFFFFFFFRRRRRRRRRRRPPPPPPPDDDDDDDDNNNNNNNNFFFFFFFFFFFVVVVVVVFFFFFFFFFFFGGGGQQQQQQQQQSSSSSSGGGGAAAAAGGGGNNNNNNNNNNNNNNNNWWWWWWWWWWWWWWAAAAAKKKKKKKKKGGGGHHHHHHHHHHYYYYYYYYYYYYTTTTTTTEEEEEEEEEGGGGAAAAAEEEEEEEEELLLLLLLLIIIIIIIIDDDDDDDDSSSSSSVVVVVVVLLLLLLLLDDDDDDDDVVVVVVVVVVVVVVRRRRRRRRRRRKKKKKKKKKEEEEEEEEEAAAAAEEEEEEEEENNNNNNNNCCCCCCDDDDDDDDCCCCCCLLLLLLLLQQQQQQQQQGGGGFFFFFFFFFFFQQQQQQQQQVVVVVVVCCCCCCHHHHHHHHHHSSSSSSLLLLLLLLGGGGGGGGGGGGTTTTTTTGGGGSSSSSSGGGGMMMMMMMMGGGGTTTTTTTLLLLLLLLLLLLLLLLIIIIIIIISSSSSSKKKKKKKKKIIIIIIIIRRRRRRRRRRREEEEEEEEEEEEEEEEEEYYYYYYYYYYYYPPPPPPPDDDDDDDDRRRRRRRRRRRMMMMMMMMMMMMMMMMLLLLLLLLTTTTTTTFFFFFFFFFFFSSSSSSVVVVVVVFFFFFFFFFFFPPPPPPPSSSSSSPPPPPPPKKKKKKKKKVVVVVVVSSSSSSDDDDDDDDTTTTTTTVVVVVVVVVVVVVVEEEEEEEEEPPPPPPPYYYYYYYYYYYYNNNNNNNNAAAAATTTTTTTLLLLLLLLSSSSSSVVVVVVVHHHHHHHHHHQQQQQQQQQLLLLLLLLVVVVVVVEEEEEEEEENNNNNNNNAAAAADDDDDDDDEEEEEEEEECCCCCCMMMMMMMMVVVVVVVLLLLLLLLDDDDDDDDNNNNNNNNEEEEEEEEEAAAAALLLLLLLLYYYYYYYYYYYYDDDDDDDDIIIIIIIICCCCCCFFFFFFFFFFFRRRRRRRRRRRTTTTTTTLLLLLLLLKKKKKKKKKLLLLLLLLSSSSSSTTTTTTTPPPPPPPSSSSSSFFFFFFFFFFFGGGGDDDDDDDDLLLLLLLLNNNNNNNNHHHHHHHHHHLLLLLLLLIIIIIIIISSSSSSAAAAATTTTTTTMMMMMMMMSSSSSSGGGGVVVVVVVTTTTTTTCCCCCCCCCCCCLLLLLLLLRRRRRRRRRRRFFFFFFFFFFFPPPPPPPGGGGQQQQQQQQQLLLLLLLLNNNNNNNNSSSSSSDDDDDDDDLLLLLLLLRRRRRRRRRRRKKKKKKKKKLLLLLLLLAAAAAVVVVVVVNNNNNNNNLLLLLLLLIIIIIIIIPPPPPPPFFFFFFFFFFFPPPPPPPRRRRRRRRRRRLLLLLLLLHHHHHHHHHHFFFFFFFFFFFFFFFFFFFFFFMMMMMMMMVVVVVVVGGGGFFFFFFFFFFFAAAAAPPPPPPPLLLLLLLLTTTTTTTSSSSSSRRRRRRRRRRRGGGGSSSSSSQQQQQQQQQQQQQQQQQQYYYYYYYYYYYYVVVVVVVSSSSSSLLLLLLLLTTTTTTTVVVVVVVPPPPPPPEEEEEEEEELLLLLLLLTTTTTTTQQQQQQQQQQQQQQQQQQMMMMMMMMWWWWWWWWWWWWWWDDDDDDDDAAAAAKKKKKKKKKNNNNNNNNMMMMMMMMMMMMMMMMCCCCCCAAAAAAAAAADDDDDDDDPPPPPPPRRRRRRRRRRRHHHHHHHHHHGGGGRRRRRRRRRRRYYYYYYYYYYYYLLLLLLLLTTTTTTTAAAAASSSSSSAAAAAMMMMMMMMFFFFFFFFFFFRRRRRRRRRRRGGGGKKKKKKKKKMMMMMMMMSSSSSSTTTTTTTKKKKKKKKKEEEEEEEEEVVVVVVVDDDDDDDDEEEEEEEEEQQQQQQQQQIIIIIIIIIIIIIIIINNNNNNNNVVVVVVVQQQQQQQQQNNNNNNNNKKKKKKKKKNNNNNNNNSSSSSSSSSSSSYYYYYYYYYYYYFFFFFFFFFFFVVVVVVVEEEEEEEEEWWWWWWWWWWWWWWIIIIIIIIPPPPPPPNNNNNNNNNNNNNNNNVVVVVVVKKKKKKKKKSSSSSSSSSSSSVVVVVVVCCCCCCDDDDDDDDIIIIIIIIPPPPPPPPPPPPPPKKKKKKKKKNNNNNNNNLLLLLLLLKKKKKKKKKMMMMMMMMSSSSSSSSSSSSTTTTTTTFFFFFFFFFFFIIIIIIIIGGGGNNNNNNNNSSSSSSTTTTTTTSSSSSSIIIIIIIIQQQQQQQQQEEEEEEEEEMMMMMMMMFFFFFFFFFFFRRRRRRRRRRRRRRRRRRRRRRVVVVVVVSSSSSSEEEEEEEEEQQQQQQQQQFFFFFFFFFFFTTTTTTTAAAAAMMMMMMMMFFFFFFFFFFFRRRRRRRRRRRRRRRRRRRRRRKKKKKKKKKAAAAAFFFFFFFFFFFLLLLLLLLHHHHHHHHHHWWWWWWWWWWWWWWYYYYYYYYYYYYTTTTTTTGGGGEEEEEEEEEGGGGMMMMMMMMDDDDDDDDEEEEEEEEEMMMMMMMMEEEEEEEEEFFFFFFFFFFFTTTTTTTEEEEEEEEEAAAAAEEEEEEEEESSSSSSNNNNNNNNMMMMMMMMNNNNNNNNDDDDDDDDLLLLLLLLVVVVVVVAAAAAEEEEEEEEEYYYYYYYYYYYYQQQQQQQQQQQQQQQQQQYYYYYYYYYYYYQQQQQQQQQDDDDDDDDAAAAAIIIIIIIIAAAAAEEEEEEEEEEEEEEEEEEEEEEEEEEEDDDDDDDDEEEEEEEEEYYYYYYYYYYYYEEEEEEEEEEEEEEEEEEEEEEEEEEEGGGGEEEEEEEEEEEEEEEEEEQQQQQQQQQYYYYYYYYYYYYDDDDDDDDEEEEEEEEEQQQQQQQQQQ

SEQ ID NO: 213 - protein, 3605 aa, Dictyostelium discoideum
MMMMMMMMRRRRRRRRRRREEEEEEEEEIIIIIIIIVVVVVVVQQQQQQQQQIIIIIIIIQQQQQQQQQAAAAAGGGGQQQQQQQQQCCCCCCGGGGNNNNNNNNQQQQQQQQQIIIIIIIIGGGGSSSSSSNNNNNNNNFFFFFFFFFFFWWWWWWWWWWWWWWEEEEEEEEEVVVVVVVIIIIIIIISSSSSSEEEEEEEEEEEEEEEEEEHHHHHHHHHHGGGGIIIIIIIIQQQQQQQQQSSSSSSDDDDDDDDGGGGFFFFFFFFFFFHHHHHHHHHHAAAAAGGGGGGGGEEEEEEEEEDDDDDDDDEEEEEEEEEHHHHHHHHHHLLLLLLLLKKKKKKKKKRRRRRRRRRRRLLLLLLLLQQQQQQQQQLLLLLLLLEEEEEEEEERRRRRRRRRRRIIIIIIIINNNNNNNNVVVVVVVYYYYYYYYYYYYYYYYYYYYYYYYNNNNNNNNEEEEEEEEEAAAAARRRRRRRRRRRDDDDDDDDGGGGKKKKKKKKKYYYYYYYYYYYYVVVVVVVPPPPPPPRRRRRRRRRRRSSSSSSVVVVVVVLLLLLLLLVVVVVVVDDDDDDDDLLLLLLLLEEEEEEEEEPPPPPPPGGGGTTTTTTTVVVVVVVDDDDDDDDTTTTTTTIIIIIIIIKKKKKKKKKAAAAASSSSSSPPPPPPPYYYYYYYYYYYYGGGGKKKKKKKKKLLLLLLLLFFFFFFFFFFFRRRRRRRRRRRPPPPPPPDDDDDDDDNNNNNNNNFFFFFFFFFFFIIIIIIIIHHHHHHHHHHGGGGQQQQQQQQQSSSSSSGGGGAAAAAGGGGNNNNNNNNNNNNNNNNWWWWWWWWWWWWWWAAAAAKKKKKKKKKGGGGHHHHHHHHHHYYYYYYYYYYYYTTTTTTTEEEEEEEEEGGGGVVVVVVVEEEEEEEEELLLLLLLLVVVVVVVEEEEEEEEESSSSSSVVVVVVVLLLLLLLLDDDDDDDDVVVVVVVVVVVVVVRRRRRRRRRRRRRRRRRRRRRREEEEEEEEETTTTTTTEEEEEEEEEGGGGCCCCCCDDDDDDDDCCCCCCLLLLLLLLQQQQQQQQQGGGGFFFFFFFFFFFQQQQQQQQQVVVVVVVTTTTTTTHHHHHHHHHHSSSSSSIIIIIIIIGGGGGGGGGGGGTTTTTTTGGGGSSSSSSGGGGLLLLLLLLGGGGTTTTTTTLLLLLLLLLLLLLLLLIIIIIIIISSSSSSKKKKKKKKKIIIIIIIIRRRRRRRRRRREEEEEEEEEEEEEEEEEEFFFFFFFFFFFPPPPPPPDDDDDDDDRRRRRRRRRRRMMMMMMMMMMMMMMMMCCCCCCTTTTTTTFFFFFFFFFFFSSSSSSVVVVVVVGGGGPPPPPPPSSSSSSPPPPPPPKKKKKKKKKVVVVVVVSSSSSSLLLLLLLLTTTTTTTVVVVVVVVVVVVVVEEEEEEEEEPPPPPPPYYYYYYYYYYYYNNNNNNNNAAAAATTTTTTTLLLLLLLLSSSSSSVVVVVVVHHHHHHHHHHQQQQQQQQQLLLLLLLLVVVVVVVEEEEEEEEENNNNNNNNAAAAADDDDDDDDEEEEEEEEEVVVVVVVMMMMMMMMCCCCCCIIIIIIIIDDDDDDDDNNNNNNNNEEEEEEEEEAAAAALLLLLLLLHHHHHHHHHHDDDDDDDDIIIIIIIICCCCCCFFFFFFFFFFFRRRRRRRRRRRTTTTTTTLLLLLLLLKKKKKKKKKLLLLLLLLTTTTTTTQQQQQQQQQPPPPPPPNNNNNNNNYYYYYYYYYYYYGGGGDDDDDDDDLLLLLLLLNNNNNNNNHHHHHHHHHHLLLLLLLLIIIIIIIISSSSSSSSSSSSVVVVVVVMMMMMMMMSSSSSSGGGGIIIIIIIITTTTTTTCCCCCCCCCCCCLLLLLLLLRRRRRRRRRRRFFFFFFFFFFFPPPPPPPGGGGQQQQQQQQQLLLLLLLLNNNNNNNNSSSSSSDDDDDDDDLLLLLLLLRRRRRRRRRRRKKKKKKKKKLLLLLLLLAAAAAVVVVVVVNNNNNNNNLLLLLLLLIIIIIIIIPPPPPPPFFFFFFFFFFFPPPPPPPRRRRRRRRRRRLLLLLLLLHHHHHHHHHHFFFFFFFFFFFFFFFFFFFFFFLLLLLLLLVVVVVVVGGGGFFFFFFFFFFFAAAAAPPPPPPPLLLLLLLLTTTTTTTAAAAAKKKKKKKKKGGGGAAAAASSSSSSSSSSSSYYYYYYYYYYYYNNNNNNNNRRRRRRRRRRRIIIIIIIITTTTTTTVVVVVVVPPPPPPPEEEEEEEEELLLLLLLLTTTTTTTQQQQQQQQQQQQQQQQQQMMMMMMMMFFFFFFFFFFFDDDDDDDDAAAAAKKKKKKKKKNNNNNNNNMMMMMMMMMMMMMMMMAAAAAAAAAASSSSSSDDDDDDDDPPPPPPPHHHHHHHHHHNNNNNNNNGGGGKKKKKKKKKYYYYYYYYYYYYLLLLLLLLTTTTTTTAAAAASSSSSSAAAAALLLLLLLLFFFFFFFFFFFRRRRRRRRRRRGGGGKKKKKKKKKIIIIIIIIFFFFFFFFFFFTTTTTTTKKKKKKKKKEEEEEEEEEVVVVVVVDDDDDDDDEEEEEEEEEQQQQQQQQQMMMMMMMMHHHHHHHHHHNNNNNNNNIIIIIIIIQQQQQQQQQTTTTTTTKKKKKKKKKNNNNNNNNSSSSSSSSSSSSYYYYYYYYYYYYFFFFFFFFFFFVVVVVVVEEEEEEEEEWWWWWWWWWWWWWWIIIIIIIIPPPPPPPHHHHHHHHHHNNNNNNNNIIIIIIIIKKKKKKKKKSSSSSSSSSSSSIIIIIIIICCCCCCDDDDDDDDIIIIIIIIPPPPPPPPPPPPPPKKKKKKKKKGGGGTTTTTTTPPPPPPPMMMMMMMMAAAAAVVVVVVVTTTTTTTFFFFFFFFFFFIIIIIIIIGGGGNNNNNNNNNNNNNNNNTTTTTTTAAAAAIIIIIIIIQQQQQQQQQDDDDDDDDLLLLLLLLFFFFFFFFFFFKKKKKKKKKRRRRRRRRRRRIIIIIIIISSSSSSIIIIIIIIHHHHHHHHHHFFFFFFFFFFFQQQQQQQQQAAAAAMMMMMMMMFFFFFFFFFFFRRRRRRRRRRRRRRRRRRRRRRKKKKKKKKKAAAAAFFFFFFFFFFFLLLLLLLLHHHHHHHHHHWWWWWWWWWWWWWWYYYYYYYYYYYYTTTTTTTLLLLLLLLEEEEEEEEEGGGGMMMMMMMMEEEEEEEEEEEEEEEEEELLLLLLLLEEEEEEEEEFFFFFFFFFFFTTTTTTTEEEEEEEEEAAAAAEEEEEEEEESSSSSSNNNNNNNNMMMMMMMMNNNNNNNNDDDDDDDDLLLLLLLLVVVVVVVYYYYYYYYYYYYEEEEEEEEEYYYYYYYYYYYYQQQQQQQQQQQQQQQQQQYYYYYYYYYYYYSSSSSSNNNNNNNNQQQQQQQQQEEEEEEEEETTTTTTTEEEEEEEEEEEEEEEEEEDDDDDDDDGGGGGGGGEEEEEEEEEYYYYYYYYYYYYQQQQQQQQQEEEEEEEEEEEEEEEEEEHHHHHHHHHHEEEEEEEEEEEEEEEEEEHHHHHHHHHHEEEEEEEEEEEEEEEEEEQQQQQQQQQAAAAAEEEEEEEEENNNNNNNNN

SEQ ID NO: 214 - protein, 3503 aa, Eimeria tenella
MMMMMMMMRRRRRRRRRRREEEEEEEEEIIIIIIIIVVVVVVVHHHHHHHHHHVVVVVVVQQQQQQQQQGGGGGGGGQQQQQQQQQCCCCCCGGGGNNNNNNNNQQQQQQQQQIIIIIIIIGGGGAAAAAKKKKKKKKKFFFFFFFFFFFWWWWWWWWWWWWWWEEEEEEEEEVVVVVVVIIIIIIIISSSSSSDDDDDDDDEEEEEEEEEHHHHHHHHHHGGGGIIIIIIIIAAAAAPPPPPPPTTTTTTTGGGGTTTTTTTYYYYYYYYYYYYKKKKKKKKKGGGGDDDDDDDDSSSSSSDDDDDDDDLLLLLLLLQQQQQQQQQLLLLLLLLEEEEEEEEERRRRRRRRRRRIIIIIIIISSSSSSVVVVVVVFFFFFFFFFFFYYYYYYYYYYYYNNNNNNNNEEEEEEEEEAAAAATTTTTTTGGGGGGGGRRRRRRRRRRRYYYYYYYYYYYYVVVVVVVPPPPPPPRRRRRRRRRRRAAAAAVVVVVVVLLLLLLLLMMMMMMMMDDDDDDDDLLLLLLLLEEEEEEEEEPPPPPPPGGGGTTTTTTTMMMMMMMMDDDDDDDDSSSSSSVVVVVVVRRRRRRRRRRRSSSSSSGGGGPPPPPPPFFFFFFFFFFFGGGGQQQQQQQQQLLLLLLLLFFFFFFFFFFFRRRRRRRRRRRPPPPPPPDDDDDDDDNNNNNNNNFFFFFFFFFFFVVVVVVVFFFFFFFFFFFGGGGQQQQQQQQQTTTTTTTGGGGAAAAAGGGGNNNNNNNNNNNNNNNNWWWWWWWWWWWWWWAAAAAKKKKKKKKKGGGGHHHHHHHHHHYYYYYYYYYYYYTTTTTTTEEEEEEEEEGGGGAAAAAEEEEEEEEELLLLLLLLIIIIIIIIDDDDDDDDSSSSSSVVVVVVVLLLLLLLLDDDDDDDDVVVVVVVVVVVVVVRRRRRRRRRRRKKKKKKKKKEEEEEEEEEAAAAAEEEEEEEEEGGGGCCCCCCDDDDDDDDCCCCCCLLLLLLLLQQQQQQQQQGGGGFFFFFFFFFFFQQQQQQQQQVVVVVVVTTTTTTTHHHHHHHHHHSSSSSSLLLLLLLLGGGGGGGGGGGGTTTTTTTGGGGSSSSSSGGGGMMMMMMMMGGGGTTTTTTTLLLLLLLLLLLLLLLLIIIIIIIISSSSSSKKKKKKKKKVVVVVVVRRRRRRRRRRREEEEEEEEEEEEEEEEEEYYYYYYYYYYYYPPPPPPPDDDDDDDDRRRRRRRRRRRIIIIIIIIMMMMMMMMEEEEEEEEETTTTTTTFFFFFFFFFFFSSSSSSVVVVVVVFFFFFFFFFFFPPPPPPPSSSSSSPPPPPPPKKKKKKKKKVVVVVVVSSSSSSDDDDDDDDTTTTTTTVVVVVVVVVVVVVVEEEEEEEEEPPPPPPPYYYYYYYYYYYYNNNNNNNNAAAAATTTTTTTLLLLLLLLSSSSSSVVVVVVVHHHHHHHHHHQQQQQQQQQLLLLLLLLVVVVVVVEEEEEEEEENNNNNNNNAAAAADDDDDDDDEEEEEEEEEVVVVVVVQQQQQQQQQVVVVVVVIIIIIIIIDDDDDDDDNNNNNNNNEEEEEEEEEAAAAALLLLLLLLYYYYYYYYYYYYDDDDDDDDIIIIIIIICCCCCCFFFFFFFFFFFRRRRRRRRRRRTTTTTTTLLLLLLLLKKKKKKKKKLLLLLLLLTTTTTTTTTTTTTTPPPPPPPTTTTTTTYYYYYYYYYYYYGGGGDDDDDDDDLLLLLLLLNNNNNNNNHHHHHHHHHHLLLLLLLLVVVVVVVSSSSSSAAAAAAAAAAMMMMMMMMSSSSSSGGGGVVVVVVVTTTTTTTCCCCCCSSSSSSLLLLLLLLRRRRRRRRRRRFFFFFFFFFFFPPPPPPPGGGGQQQQQQQQQLLLLLLLLNNNNNNNNSSSSSSDDDDDDDDLLLLLLLLRRRRRRRRRRRKKKKKKKKKLLLLLLLLAAAAAVVVVVVVNNNNNNNNLLLLLLLLVVVVVVVPPPPPPPFFFFFFFFFFFPPPPPPPRRRRRRRRRRRLLLLLLLLHHHHHHHHHHFFFFFFFFFFFFFFFFFFFFFFLLLLLLLLIIIIIIIIGGGGFFFFFFFFFFFAAAAAPPPPPPPLLLLLLLLTTTTTTTSSSSSSRRRRRRRRRRRGGGGSSSSSSQQQQQQQQQQQQQQQQQQYYYYYYYYYYYYRRRRRRRRRRRAAAAALLLLLLLLTTTTTTTVVVVVVVPPPPPPPEEEEEEEEELLLLLLLLTTTTTTTQQQQQQQQQQQQQQQQQQMMMMMMMMFFFFFFFFFFFDDDDDDDDAAAAAKKKKKKKKKNNNNNNNNMMMMMMMMMMMMMMMMCCCCCCAAAAASSSSSSDDDDDDDDPPPPPPPRRRRRRRRRRRHHHHHHHHHHGGGGRRRRRRRRRRRYYYYYYYYYYYYLLLLLLLLTTTTTTTAAAAACCCCCCAAAAALLLLLLLLFFFFFFFFFFFRRRRRRRRRRRGGGGRRRRRRRRRRRMMMMMMMMSSSSSSTTTTTTTKKKKKKKKKEEEEEEEEEVVVVVVVDDDDDDDDEEEEEEEEEQQQQQQQQQMMMMMMMMLLLLLLLLNNNNNNNNVVVVVVVQQQQQQQQQNNNNNNNNKKKKKKKKKNNNNNNNNSSSSSSSSSSSSYYYYYYYYYYYYFFFFFFFFFFFVVVVVVVEEEEEEEEEWWWWWWWWWWWWWWIIIIIIIIPPPPPPPNNNNNNNNNNNNNNNNMMMMMMMMKKKKKKKKKSSSSSSGGGGVVVVVVVCCCCCCDDDDDDDDIIIIIIIIPPPPPPPPPPPPPPKKKKKKKKKGGGGLLLLLLLLKKKKKKKKKMMMMMMMMSSSSSSVVVVVVVTTTTTTTFFFFFFFFFFFVVVVVVVGGGGNNNNNNNNSSSSSSTTTTTTTAAAAAIIIIIIIIQQQQQQQQQEEEEEEEEEMMMMMMMMFFFFFFFFFFFKKKKKKKKKRRRRRRRRRRRVVVVVVVSSSSSSDDDDDDDDQQQQQQQQQFFFFFFFFFFFTTTTTTTAAAAAMMMMMMMMFFFFFFFFFFFRRRRRRRRRRRRRRRRRRRRRRKKKKKKKKKAAAAAFFFFFFFFFFFLLLLLLLLHHHHHHHHHHWWWWWWWWWWWWWWYYYYYYYYYYYYTTTTTTTGGGGEEEEEEEEEGGGGMMMMMMMMDDDDDDDDEEEEEEEEEMMMMMMMMEEEEEEEEEFFFFFFFFFFFTTTTTTTEEEEEEEEEAAAAAEEEEEEEEESSSSSSNNNNNNNNMMMMMMMMNNNNNNNNDDDDDDDDLLLLLLLLVVVVVVVSSSSSSEEEEEEEEEYYYYYYYYYYYYQQQQQQQQQQQQQQQQQQYYYYYYYYYYYYQQQQQQQQQDDDDDDDDAAAAATTTTTTTAAAAAEEEEEEEEEEEEEEEEEEEEEEEEEEEGGGGEEEEEEEEEFFFFFFFFFFFDDDDDDDDEEEEEEEEEEEEEEEEEEEEEEEEEEEGGGGVVVVVVVMMMMMMMMDDDDDDDDAAAAAEEEEEEEEEGGGGAAAAAAAAAAA

SEQ ID NO: 215 - protein, 3507 aa, Epichloe typhina
MMMMMMMMRRRRRRRRRRREEEEEEEEEIIIIIIIIVVVVVVVHHHHHHHHHHLLLLLLLLQQQQQQQQQTTTTTTTGGGGQQQQQQQQQCCCCCCGGGGNNNNNNNNQQQQQQQQQIIIIIIIIGGGGAAAAAAAAAAFFFFFFFFFFFWWWWWWWWWWWWWWQQQQQQQQQTTTTTTTIIIIIIIISSSSSSGGGGEEEEEEEEEHHHHHHHHHHGGGGLLLLLLLLDDDDDDDDSSSSSSNNNNNNNNGGGGVVVVVVVYYYYYYYYYYYYNNNNNNNNGGGGTTTTTTTSSSSSSEEEEEEEEELLLLLLLLQQQQQQQQQLLLLLLLLEEEEEEEEERRRRRRRRRRRMMMMMMMMSSSSSSVVVVVVVYYYYYYYYYYYYFFFFFFFFFFFNNNNNNNNEEEEEEEEEAAAAASSSSSSGGGGNNNNNNNNKKKKKKKKKYYYYYYYYYYYYVVVVVVVPPPPPPPRRRRRRRRRRRAAAAAVVVVVVVLLLLLLLLVVVVVVVDDDDDDDDLLLLLLLLEEEEEEEEEPPPPPPPGGGGTTTTTTTMMMMMMMMDDDDDDDDAAAAAVVVVVVVRRRRRRRRRRRAAAAAGGGGPPPPPPPFFFFFFFFFFFGGGGQQQQQQQQQLLLLLLLLFFFFFFFFFFFRRRRRRRRRRRPPPPPPPDDDDDDDDNNNNNNNNFFFFFFFFFFFVVVVVVVFFFFFFFFFFFGGGGQQQQQQQQQSSSSSSGGGGAAAAAGGGGNNNNNNNNNNNNNNNNWWWWWWWWWWWWWWAAAAAKKKKKKKKKGGGGHHHHHHHHHHYYYYYYYYYYYYTTTTTTTEEEEEEEEEGGGGAAAAAEEEEEEEEELLLLLLLLVVVVVVVDDDDDDDDQQQQQQQQQVVVVVVVLLLLLLLLDDDDDDDDVVVVVVVVVVVVVVRRRRRRRRRRRRRRRRRRRRRREEEEEEEEEAAAAAEEEEEEEEEGGGGCCCCCCDDDDDDDDCCCCCCLLLLLLLLQQQQQQQQQGGGGFFFFFFFFFFFQQQQQQQQQIIIIIIIITTTTTTTHHHHHHHHHHSSSSSSLLLLLLLLGGGGGGGGGGGGTTTTTTTGGGGAAAAAGGGGMMMMMMMMGGGGTTTTTTTLLLLLLLLLLLLLLLLIIIIIIIISSSSSSKKKKKKKKKIIIIIIIIRRRRRRRRRRREEEEEEEEEEEEEEEEEEFFFFFFFFFFFPPPPPPPDDDDDDDDRRRRRRRRRRRMMMMMMMMMMMMMMMMAAAAATTTTTTTFFFFFFFFFFFSSSSSSVVVVVVVVVVVVVVPPPPPPPSSSSSSPPPPPPPKKKKKKKKKVVVVVVVSSSSSSDDDDDDDDTTTTTTTVVVVVVVVVVVVVVEEEEEEEEEPPPPPPPYYYYYYYYYYYYNNNNNNNNAAAAATTTTTTTLLLLLLLLSSSSSSVVVVVVVHHHHHHHHHHQQQQQQQQQLLLLLLLLVVVVVVVEEEEEEEEENNNNNNNNSSSSSSDDDDDDDDEEEEEEEEETTTTTTTFFFFFFFFFFFCCCCCCIIIIIIIIDDDDDDDDNNNNNNNNEEEEEEEEEAAAAALLLLLLLLYYYYYYYYYYYYDDDDDDDDIIIIIIIICCCCCCMMMMMMMMRRRRRRRRRRRTTTTTTTLLLLLLLLKKKKKKKKKLLLLLLLLSSSSSSNNNNNNNNPPPPPPPSSSSSSYYYYYYYYYYYYGGGGDDDDDDDDLLLLLLLLNNNNNNNNYYYYYYYYYYYYLLLLLLLLVVVVVVVSSSSSSAAAAAVVVVVVVMMMMMMMMSSSSSSGGGGVVVVVVVTTTTTTTTTTTTTTCCCCCCLLLLLLLLRRRRRRRRRRRFFFFFFFFFFFPPPPPPPGGGGQQQQQQQQQLLLLLLLLNNNNNNNNSSSSSSDDDDDDDDLLLLLLLLRRRRRRRRRRRKKKKKKKKKLLLLLLLLAAAAAVVVVVVVNNNNNNNNMMMMMMMMVVVVVVVPPPPPPPFFFFFFFFFFFPPPPPPPRRRRRRRRRRRLLLLLLLLHHHHHHHHHHFFFFFFFFFFFFFFFFFFFFFFMMMMMMMMVVVVVVVGGGGFFFFFFFFFFFAAAAAPPPPPPPLLLLLLLLTTTTTTTSSSSSSRRRRRRRRRRRGGGGAAAAAHHHHHHHHHHSSSSSSFFFFFFFFFFFRRRRRRRRRRRAAAAAVVVVVVVSSSSSSVVVVVVVPPPPPPPEEEEEEEEELLLLLLLLTTTTTTTQQQQQQQQQQQQQQQQQQMMMMMMMMFFFFFFFFFFFDDDDDDDDPPPPPPPKKKKKKKKKNNNNNNNNMMMMMMMMMMMMMMMMAAAAAAAAAASSSSSSDDDDDDDDFFFFFFFFFFFRRRRRRRRRRRNNNNNNNNGGGGRRRRRRRRRRRYYYYYYYYYYYYLLLLLLLLTTTTTTTCCCCCCSSSSSSAAAAAIIIIIIIIFFFFFFFFFFFRRRRRRRRRRRGGGGKKKKKKKKKVVVVVVVAAAAAMMMMMMMMKKKKKKKKKEEEEEEEEEVVVVVVVEEEEEEEEEDDDDDDDDQQQQQQQQQMMMMMMMMRRRRRRRRRRRNNNNNNNNVVVVVVVQQQQQQQQQNNNNNNNNKKKKKKKKKNNNNNNNNSSSSSSSSSSSSYYYYYYYYYYYYFFFFFFFFFFFVVVVVVVEEEEEEEEEWWWWWWWWWWWWWWIIIIIIIIPPPPPPPNNNNNNNNNNNNNNNNIIIIIIIIQQQQQQQQQTTTTTTTAAAAALLLLLLLLCCCCCCAAAAAIIIIIIIIPPPPPPPPPPPPPPRRRRRRRRRRRGGGGLLLLLLLLKKKKKKKKKMMMMMMMMSSSSSSSSSSSSTTTTTTTFFFFFFFFFFFIIIIIIIIGGGGNNNNNNNNSSSSSSTTTTTTTSSSSSSIIIIIIIIQQQQQQQQQEEEEEEEEELLLLLLLLFFFFFFFFFFFKKKKKKKKKRRRRRRRRRRRVVVVVVVGGGGEEEEEEEEEQQQQQQQQQFFFFFFFFFFFTTTTTTTAAAAAMMMMMMMMFFFFFFFFFFFRRRRRRRRRRRRRRRRRRRRRRKKKKKKKKKAAAAAFFFFFFFFFFFLLLLLLLLHHHHHHHHHHWWWWWWWWWWWWWWYYYYYYYYYYYYTTTTTTTGGGGEEEEEEEEEGGGGMMMMMMMMDDDDDDDDEEEEEEEEEMMMMMMMMEEEEEEEEEFFFFFFFFFFFTTTTTTTEEEEEEEEEAAAAAEEEEEEEEESSSSSSNNNNNNNNMMMMMMMMNNNNNNNNDDDDDDDDLLLLLLLLVVVVVVVSSSSSSEEEEEEEEEYYYYYYYYYYYYQQQQQQQQQQQQQQQQQQYYYYYYYYYYYYQQQQQQQQQDDDDDDDDAAAAAGGGGIIIIIIIIDDDDDDDDEEEEEEEEEEEEEEEEEEEEEEEEEEEEEEEEEEEEEEEEEEEEEYYYYYYYYYYYYEEEEEEEEEEEEEEEEEEEEEEEEEEEAAAAAPPPPPPPVVVVVVVDDDDDDDDEEEEEEEEEPPPPPPPLLLLLLLLEEEEEEEEEE

SEQ ID NO: 216 - protein, 3486 aa, Blumeria graminis
MMMMMMMMRRRRRRRRRRREEEEEEEEEIIIIIIIIVVVVVVVHHHHHHHHHHLLLLLLLLQQQQQQQQQTTTTTTTGGGGQQQQQQQQQCCCCCCGGGGNNNNNNNNQQQQQQQQQIIIIIIIIGGGGAAAAAAAAAAFFFFFFFFFFFWWWWWWWWWWWWWWQQQQQQQQQTTTTTTTIIIIIIIISSSSSSGGGGEEEEEEEEEHHHHHHHHHHGGGGLLLLLLLLDDDDDDDDGGGGSSSSSSGGGGVVVVVVVYYYYYYYYYYYYNNNNNNNNGGGGTTTTTTTSSSSSSDDDDDDDDLLLLLLLLQQQQQQQQQLLLLLLLLEEEEEEEEERRRRRRRRRRRMMMMMMMMNNNNNNNNVVVVVVVYYYYYYYYYYYYFFFFFFFFFFFNNNNNNNNEEEEEEEEEAAAAASSSSSSGGGGNNNNNNNNKKKKKKKKKYYYYYYYYYYYYVVVVVVVPPPPPPPRRRRRRRRRRRAAAAAVVVVVVVLLLLLLLLVVVVVVVDDDDDDDDLLLLLLLLEEEEEEEEEPPPPPPPGGGGTTTTTTTMMMMMMMMDDDDDDDDAAAAAVVVVVVVRRRRRRRRRRRAAAAAGGGGPPPPPPPFFFFFFFFFFFGGGGQQQQQQQQQLLLLLLLLFFFFFFFFFFFRRRRRRRRRRRPPPPPPPDDDDDDDDNNNNNNNNFFFFFFFFFFFVVVVVVVFFFFFFFFFFFGGGGQQQQQQQQQSSSSSSGGGGAAAAAGGGGNNNNNNNNNNNNNNNNWWWWWWWWWWWWWWAAAAAKKKKKKKKKGGGGHHHHHHHHHHYYYYYYYYYYYYTTTTTTTEEEEEEEEEGGGGAAAAAEEEEEEEEELLLLLLLLVVVVVVVDDDDDDDDQQQQQQQQQVVVVVVVLLLLLLLLDDDDDDDDVVVVVVVVVVVVVVRRRRRRRRRRRRRRRRRRRRRREEEEEEEEEAAAAAEEEEEEEEEGGGGCCCCCCDDDDDDDDCCCCCCLLLLLLLLQQQQQQQQQGGGGFFFFFFFFFFFQQQQQQQQQIIIIIIIITTTTTTTHHHHHHHHHHSSSSSSLLLLLLLLGGGGGGGGGGGGTTTTTTTGGGGAAAAAGGGGMMMMMMMMGGGGTTTTTTTLLLLLLLLLLLLLLLLIIIIIIIISSSSSSKKKKKKKKKIIIIIIIIRRRRRRRRRRREEEEEEEEEEEEEEEEEEFFFFFFFFFFFPPPPPPPDDDDDDDDRRRRRRRRRRRMMMMMMMMMMMMMMMMAAAAATTTTTTTFFFFFFFFFFFSSSSSSVVVVVVVVVVVVVVPPPPPPPSSSSSSPPPPPPPKKKKKKKKKVVVVVVVSSSSSSDDDDDDDDTTTTTTTVVVVVVVVVVVVVVEEEEEEEEEPPPPPPPYYYYYYYYYYYYNNNNNNNNAAAAATTTTTTTLLLLLLLLSSSSSSVVVVVVVHHHHHHHHHHQQQQQQQQQLLLLLLLLVVVVVVVEEEEEEEEENNNNNNNNSSSSSSDDDDDDDDEEEEEEEEETTTTTTTFFFFFFFFFFFCCCCCCIIIIIIIIDDDDDDDDNNNNNNNNEEEEEEEEEAAAAALLLLLLLLYYYYYYYYYYYYDDDDDDDDIIIIIIIICCCCCCMMMMMMMMRRRRRRRRRRRTTTTTTTLLLLLLLLKKKKKKKKKLLLLLLLLSSSSSSNNNNNNNNPPPPPPPSSSSSSYYYYYYYYYYYYGGGGDDDDDDDDLLLLLLLLNNNNNNNNHHHHHHHHHHLLLLLLLLVVVVVVVSSSSSSAAAAAVVVVVVVMMMMMMMMSSSSSSGGGGVVVVVVVTTTTTTTTTTTTTTCCCCCCLLLLLLLLRRRRRRRRRRRFFFFFFFFFFFPPPPPPPGGGGQQQQQQQQQLLLLLLLLNNNNNNNNSSSSSSDDDDDDDDLLLLLLLLRRRRRRRRRRRKKKKKKKKKLLLLLLLLAAAAAVVVVVVVNNNNNNNNMMMMMMMMVVVVVVVPPPPPPPFFFFFFFFFFFPPPPPPPRRRRRRRRRRRLLLLLLLLHHHHHHHHHHFFFFFFFFFFFFFFFFFFFFFFMMMMMMMMVVVVVVVGGGGFFFFFFFFFFFAAAAAPPPPPPPLLLLLLLLTTTTTTTSSSSSSRRRRRRRRRRRGGGGAAAAAHHHHHHHHHHSSSSSSFFFFFFFFFFFRRRRRRRRRRRAAAAAVVVVVVVTTTTTTTVVVVVVVPPPPPPPEEEEEEEEELLLLLLLLTTTTTTTQQQQQQQQQQQQQQQQQQMMMMMMMMFFFFFFFFFFFDDDDDDDDPPPPPPPKKKKKKKKKNNNNNNNNMMMMMMMMMMMMMMMMAAAAAAAAAASSSSSSDDDDDDDDFFFFFFFFFFFRRRRRRRRRRRNNNNNNNNGGGGRRRRRRRRRRRYYYYYYYYYYYYLLLLLLLLTTTTTTTCCCCCCSSSSSSAAAAAIIIIIIIIFFFFFFFFFFFRRRRRRRRRRRGGGGKKKKKKKKKVVVVVVVSSSSSSMMMMMMMMKKKKKKKKKEEEEEEEEEVVVVVVVEEEEEEEEEDDDDDDDDQQQQQQQQQMMMMMMMMRRRRRRRRRRRNNNNNNNNVVVVVVVQQQQQQQQQQQQQQQQQQKKKKKKKKKNNNNNNNNVVVVVVVSSSSSSYYYYYYYYYYYYFFFFFFFFFFFVVVVVVVEEEEEEEEEWWWWWWWWWWWWWWIIIIIIIIPPPPPPPNNNNNNNNNNNNNNNNVVVVVVVQQQQQQQQQTTTTTTTAAAAALLLLLLLLCCCCCCSSSSSSIIIIIIIIPPPPPPPPPPPPPPRRRRRRRRRRRGGGGLLLLLLLLKKKKKKKKKMMMMMMMMSSSSSSSSSSSSTTTTTTTFFFFFFFFFFFVVVVVVVGGGGNNNNNNNNSSSSSSTTTTTTTSSSSSSIIIIIIIIQQQQQQQQQEEEEEEEEELLLLLLLLFFFFFFFFFFFKKKKKKKKKRRRRRRRRRRRVVVVVVVGGGGDDDDDDDDQQQQQQQQQFFFFFFFFFFFTTTTTTTAAAAAMMMMMMMMFFFFFFFFFFFRRRRRRRRRRRRRRRRRRRRRRKKKKKKKKKAAAAAFFFFFFFFFFFLLLLLLLLHHHHHHHHHHWWWWWWWWWWWWWWYYYYYYYYYYYYTTTTTTTGGGGEEEEEEEEEGGGGMMMMMMMMDDDDDDDDEEEEEEEEEMMMMMMMMEEEEEEEEEFFFFFFFFFFFTTTTTTTEEEEEEEEEAAAAAEEEEEEEEESSSSSSNNNNNNNNMMMMMMMMNNNNNNNNDDDDDDDDLLLLLLLLVVVVVVVSSSSSSEEEEEEEEEYYYYYYYYYYYYQQQQQQQQQQQQQQQQQQYYYYYYYYYYYYQQQQQQQQQEEEEEEEEEAAAAASSSSSSIIIIIIIISSSSSSEEEEEEEEEGGGGEEEEEEEEEEEEEEEEEEEEEEEEEEEYYYYYYYYYYYYPPPPPPPEEEEEEEEEEEEEEEEEEVVVVVVVSSSSSSNNNNNNNNEEEEEEEEEEEEEEEEEEEEEEEEEEEE

SEQ ID NO: 217 - protein, 3462 aa, Euglena gracilis
MMMMMMMMRRRRRRRRRRREEEEEEEEEIIIIIIIIVVVVVVVHHHHHHHHHHIIIIIIIIQQQQQQQQQAAAAAGGGGQQQQQQQQQCCCCCCGGGGNNNNNNNNQQQQQQQQQIIIIIIIIGGGGSSSSSSKKKKKKKKKFFFFFFFFFFFWWWWWWWWWWWWWWEEEEEEEEEVVVVVVVIIIIIIIISSSSSSDDDDDDDDEEEEEEEEEQQQQQQQQQGGGGVVVVVVVDDDDDDDDPPPPPPPPPPPPPPDDDDDDDDIIIIIIIIPPPPPPPGGGGDDDDDDDDSSSSSSDDDDDDDDLLLLLLLLQQQQQQQQQLLLLLLLLEEEEEEEEERRRRRRRRRRRIIIIIIIINNNNNNNNVVVVVVVYYYYYYYYYYYYYYYYYYYYYYYYNNNNNNNNEEEEEEEEEAAAAATTTTTTTGGGGGGGGRRRRRRRRRRRYYYYYYYYYYYYVVVVVVVPPPPPPPAAAAAIIIIIIIILLLLLLLLMMMMMMMMDDDDDDDDLLLLLLLLEEEEEEEEEPPPPPPPGGGGTTTTTTTMMMMMMMMDDDDDDDDSSSSSSVVVVVVVRRRRRRRRRRRAAAAAGGGGPPPPPPPYYYYYYYYYYYYGGGGQQQQQQQQQIIIIIIIIFFFFFFFFFFFRRRRRRRRRRRPPPPPPPDDDDDDDDNNNNNNNNFFFFFFFFFFFVVVVVVVFFFFFFFFFFFGGGGQQQQQQQQQTTTTTTTGGGGAAAAAGGGGNNNNNNNNNNNNNNNNWWWWWWWWWWWWWWAAAAAKKKKKKKKKGGGGHHHHHHHHHHYYYYYYYYYYYYTTTTTTTEEEEEEEEEGGGGPPPPPPPEEEEEEEEELLLLLLLLIIIIIIIIDDDDDDDDSSSSSSVVVVVVVLLLLLLLLDDDDDDDDVVVVVVVVVVVVVVRRRRRRRRRRRKKKKKKKKKEEEEEEEEEAAAAAEEEEEEEEESSSSSSCCCCCCDDDDDDDDCCCCCCLLLLLLLLQQQQQQQQQGGGGFFFFFFFFFFFQQQQQQQQQIIIIIIIIAAAAAHHHHHHHHHHSSSSSSLLLLLLLLGGGGGGGGGGGGTTTTTTTGGGGSSSSSSGGGGMMMMMMMMGGGGTTTTTTTLLLLLLLLLLLLLLLLIIIIIIIISSSSSSKKKKKKKKKIIIIIIIIRRRRRRRRRRREEEEEEEEEEEEEEEEEEYYYYYYYYYYYYPPPPPPPDDDDDDDDRRRRRRRRRRRMMMMMMMMMMMMMMMMMMMMMMMMTTTTTTTFFFFFFFFFFFSSSSSSVVVVVVVIIIIIIIIPPPPPPPSSSSSSPPPPPPPKKKKKKKKKVVVVVVVSSSSSSDDDDDDDDTTTTTTTVVVVVVVVVVVVVVEEEEEEEEEPPPPPPPYYYYYYYYYYYYNNNNNNNNTTTTTTTTTTTTTTLLLLLLLLSSSSSSVVVVVVVHHHHHHHHHHQQQQQQQQQLLLLLLLLVVVVVVVEEEEEEEEENNNNNNNNAAAAADDDDDDDDEEEEEEEEEVVVVVVVMMMMMMMMCCCCCCIIIIIIIIGGGGNNNNNNNNEEEEEEEEEAAAAALLLLLLLLYYYYYYYYYYYYDDDDDDDDIIIIIIIICCCCCCLLLLLLLLPPPPPPPTTTTTTTLLLLLLLLKKKKKKKKKLLLLLLLLTTTTTTTTTTTTTTPPPPPPPTTTTTTTFFFFFFFFFFFGGGGHHHHHHHHHHEEEEEEEEETTTTTTTLLLLLLLLVVVVVVVSSSSSSAAAAAVVVVVVVMMMMMMMMSSSSSSGGGGVVVVVVVTTTTTTTCCCCCCCCCCCCLLLLLLLLRRRRRRRRRRRFFFFFFFFFFFPPPPPPPGGGGQQQQQQQQQLLLLLLLLNNNNNNNNSSSSSSDDDDDDDDLLLLLLLLRRRRRRRRRRRKKKKKKKKKLLLLLLLLAAAAAVVVVVVVNNNNNNNNLLLLLLLLIIIIIIIIPPPPPPPFFFFFFFFFFFPPPPPPPRRRRRRRRRRRLLLLLLLLHHHHHHHHHHFFFFFFFFFFFFFFFFFFFFFFLLLLLLLLVVVVVVVGGGGFFFFFFFFFFFAAAAAPPPPPPPLLLLLLLLTTTTTTTSSSSSSRRRRRRRRRRRGGGGSSSSSSQQQQQQQQQQQQQQQQQQYYYYYYYYYYYYRRRRRRRRRRRAAAAALLLLLLLLTTTTTTTVVVVVVVPPPPPPPEEEEEEEEELLLLLLLLTTTTTTTQQQQQQQQQQQQQQQQQQMMMMMMMMFFFFFFFFFFFDDDDDDDDAAAAAKKKKKKKKKNNNNNNNNMMMMMMMMMMMMMMMMAAAAAAAAAASSSSSSDDDDDDDDPPPPPPPAAAAAHHHHHHHHHHGGGGRRRRRRRRRRRYYYYYYYYYYYYLLLLLLLLTTTTTTTAAAAASSSSSSAAAAAMMMMMMMMFFFFFFFFFFFRRRRRRRRRRRGGGGRRRRRRRRRRRMMMMMMMMSSSSSSTTTTTTTKKKKKKKKKEEEEEEEEEVVVVVVVDDDDDDDDEEEEEEEEEQQQQQQQQQMMMMMMMMLLLLLLLLNNNNNNNNVVVVVVVQQQQQQQQQNNNNNNNNKKKKKKKKKNNNNNNNNSSSSSSSSSSSSYYYYYYYYYYYYFFFFFFFFFFFVVVVVVVEEEEEEEEEWWWWWWWWWWWWWWIIIIIIIIPPPPPPPNNNNNNNNNNNNNNNNIIIIIIIIKKKKKKKKKSSSSSSSSSSSSVVVVVVVCCCCCCDDDDDDDDIIIIIIIIPPPPPPPPPPPPPPKKKKKKKKKGGGGLLLLLLLLKKKKKKKKKMMMMMMMMSSSSSSAAAAATTTTTTTFFFFFFFFFFFIIIIIIIIGGGGNNNNNNNNNNNNNNNNTTTTTTTAAAAAIIIIIIIIQQQQQQQQQEEEEEEEEEMMMMMMMMFFFFFFFFFFFKKKKKKKKKRRRRRRRRRRRVVVVVVVSSSSSSEEEEEEEEEQQQQQQQQQFFFFFFFFFFFTTTTTTTAAAAAMMMMMMMMFFFFFFFFFFFRRRRRRRRRRRRRRRRRRRRRRKKKKKKKKKAAAAAFFFFFFFFFFFLLLLLLLLHHHHHHHHHHWWWWWWWWWWWWWWYYYYYYYYYYYYTTTTTTTGGGGEEEEEEEEEGGGGMMMMMMMMDDDDDDDDEEEEEEEEEMMMMMMMMEEEEEEEEEFFFFFFFFFFFTTTTTTTEEEEEEEEEAAAAAEEEEEEEEESSSSSSNNNNNNNNMMMMMMMMNNNNNNNNDDDDDDDDLLLLLLLLVVVVVVVSSSSSSEEEEEEEEEYYYYYYYYYYYYQQQQQQQQQQQQQQQQQQYYYYYYYYYYYYQQQQQQQQQDDDDDDDDAAAAATTTTTTTVVVVVVVEEEEEEEEEEEEEEEEEEEEEEEEEEEGGGGEEEEEEEEEFFFFFFFFFFFDDDDDDDDEEEEEEEEEEEEEEEEEEEEEEEEEEEDDDDDDDDVVVVVVVEEEEEEEEEQQQQQQQQQYYYYYYYYYYYYY

SEQ ID NO: 218 - protein, 3500 aa, Monoeuplotes crassus
MMMMMMMMRRRRRRRRRRREEEEEEEEEIIIIIIIIVVVVVVVHHHHHHHHHHVVVVVVVQQQQQQQQQGGGGGGGGQQQQQQQQQCCCCCCGGGGNNNNNNNNQQQQQQQQQIIIIIIIIGGGGAAAAAKKKKKKKKKFFFFFFFFFFFWWWWWWWWWWWWWWEEEEEEEEEVVVVVVVIIIIIIIISSSSSSDDDDDDDDEEEEEEEEEHHHHHHHHHHGGGGVVVVVVVDDDDDDDDPPPPPPPTTTTTTTGGGGTTTTTTTYYYYYYYYYYYYHHHHHHHHHHGGGGDDDDDDDDSSSSSSDDDDDDDDLLLLLLLLQQQQQQQQQLLLLLLLLEEEEEEEEERRRRRRRRRRRIIIIIIIINNNNNNNNVVVVVVVYYYYYYYYYYYYYYYYYYYYYYYYNNNNNNNNEEEEEEEEEAAAAATTTTTTTGGGGGGGGRRRRRRRRRRRYYYYYYYYYYYYVVVVVVVPPPPPPPRRRRRRRRRRRAAAAAVVVVVVVLLLLLLLLMMMMMMMMDDDDDDDDLLLLLLLLEEEEEEEEEPPPPPPPGGGGTTTTTTTMMMMMMMMDDDDDDDDSSSSSSVVVVVVVRRRRRRRRRRRAAAAAGGGGPPPPPPPFFFFFFFFFFFGGGGQQQQQQQQQLLLLLLLLFFFFFFFFFFFRRRRRRRRRRRPPPPPPPDDDDDDDDNNNNNNNNFFFFFFFFFFFVVVVVVVFFFFFFFFFFFGGGGQQQQQQQQQTTTTTTTGGGGAAAAAGGGGNNNNNNNNNNNNNNNNWWWWWWWWWWWWWWAAAAAKKKKKKKKKGGGGHHHHHHHHHHYYYYYYYYYYYYTTTTTTTEEEEEEEEEGGGGAAAAAEEEEEEEEELLLLLLLLIIIIIIIIDDDDDDDDSSSSSSVVVVVVVLLLLLLLLDDDDDDDDVVVVVVVVVVVVVVRRRRRRRRRRRKKKKKKKKKEEEEEEEEEAAAAAEEEEEEEEEGGGGCCCCCCDDDDDDDDCCCCCCLLLLLLLLQQQQQQQQQGGGGFFFFFFFFFFFQQQQQQQQQIIIIIIIITTTTTTTHHHHHHHHHHSSSSSSLLLLLLLLGGGGGGGGGGGGTTTTTTTGGGGSSSSSSGGGGMMMMMMMMGGGGTTTTTTTLLLLLLLLLLLLLLLLIIIIIIIISSSSSSKKKKKKKKKIIIIIIIIRRRRRRRRRRREEEEEEEEEEEEEEEEEEYYYYYYYYYYYYPPPPPPPDDDDDDDDRRRRRRRRRRRIIIIIIIIMMMMMMMMEEEEEEEEETTTTTTTFFFFFFFFFFFSSSSSSVVVVVVVFFFFFFFFFFFPPPPPPPSSSSSSPPPPPPPKKKKKKKKKVVVVVVVSSSSSSDDDDDDDDTTTTTTTVVVVVVVVVVVVVVEEEEEEEEEPPPPPPPYYYYYYYYYYYYNNNNNNNNAAAAATTTTTTTLLLLLLLLSSSSSSVVVVVVVHHHHHHHHHHQQQQQQQQQLLLLLLLLVVVVVVVEEEEEEEEENNNNNNNNAAAAADDDDDDDDEEEEEEEEEVVVVVVVMMMMMMMMVVVVVVVIIIIIIIIDDDDDDDDNNNNNNNNEEEEEEEEEAAAAALLLLLLLLYYYYYYYYYYYYDDDDDDDDIIIIIIIICCCCCCFFFFFFFFFFFRRRRRRRRRRRTTTTTTTLLLLLLLLKKKKKKKKKLLLLLLLLTTTTTTTTTTTTTTPPPPPPPTTTTTTTYYYYYYYYYYYYGGGGDDDDDDDDLLLLLLLLNNNNNNNNHHHHHHHHHHLLLLLLLLVVVVVVVSSSSSSAAAAACCCCCCIIIIIIIISSSSSSGGGGVVVVVVVTTTTTTTSSSSSSCCCCCCLLLLLLLLRRRRRRRRRRRFFFFFFFFFFFPPPPPPPGGGGQQQQQQQQQLLLLLLLLNNNNNNNNSSSSSSDDDDDDDDLLLLLLLLRRRRRRRRRRRKKKKKKKKKLLLLLLLLAAAAAVVVVVVVNNNNNNNNLLLLLLLLIIIIIIIIPPPPPPPFFFFFFFFFFFPPPPPPPRRRRRRRRRRRLLLLLLLLHHHHHHHHHHFFFFFFFFFFFFFFFFFFFFFFMMMMMMMMVVVVVVVGGGGFFFFFFFFFFFAAAAAPPPPPPPLLLLLLLLTTTTTTTSSSSSSRRRRRRRRRRRGGGGSSSSSSQQQQQQQQQQQQQQQQQQYYYYYYYYYYYYRRRRRRRRRRRAAAAALLLLLLLLTTTTTTTVVVVVVVPPPPPPPEEEEEEEEELLLLLLLLTTTTTTTQQQQQQQQQQQQQQQQQQMMMMMMMMFFFFFFFFFFFDDDDDDDDAAAAAKKKKKKKKKNNNNNNNNMMMMMMMMMMMMMMMMCCCCCCAAAAASSSSSSDDDDDDDDPPPPPPPRRRRRRRRRRRHHHHHHHHHHGGGGRRRRRRRRRRRYYYYYYYYYYYYLLLLLLLLTTTTTTTAAAAASSSSSSAAAAAMMMMMMMMFFFFFFFFFFFRRRRRRRRRRRGGGGRRRRRRRRRRRMMMMMMMMSSSSSSTTTTTTTKKKKKKKKKEEEEEEEEEVVVVVVVDDDDDDDDEEEEEEEEEQQQQQQQQQMMMMMMMMLLLLLLLLNNNNNNNNVVVVVVVQQQQQQQQQNNNNNNNNKKKKKKKKKNNNNNNNNSSSSSSSSSSSSYYYYYYYYYYYYFFFFFFFFFFFVVVVVVVEEEEEEEEEWWWWWWWWWWWWWWIIIIIIIIPPPPPPPNNNNNNNNNNNNNNNNIIIIIIIIKKKKKKKKKSSSSSSSSSSSSVVVVVVVCCCCCCDDDDDDDDIIIIIIIIPPPPPPPPPPPPPPKKKKKKKKKGGGGLLLLLLLLKKKKKKKKKLLLLLLLLAAAAASSSSSSTTTTTTTFFFFFFFFFFFIIIIIIIIGGGGNNNNNNNNSSSSSSTTTTTTTAAAAAIIIIIIIIQQQQQQQQQEEEEEEEEEMMMMMMMMFFFFFFFFFFFKKKKKKKKKRRRRRRRRRRRVVVVVVVAAAAAEEEEEEEEEQQQQQQQQQFFFFFFFFFFFTTTTTTTAAAAAMMMMMMMMFFFFFFFFFFFRRRRRRRRRRRRRRRRRRRRRRKKKKKKKKKAAAAAFFFFFFFFFFFLLLLLLLLHHHHHHHHHHWWWWWWWWWWWWWWYYYYYYYYYYYYTTTTTTTGGGGEEEEEEEEEGGGGMMMMMMMMDDDDDDDDEEEEEEEEEMMMMMMMMEEEEEEEEEFFFFFFFFFFFTTTTTTTEEEEEEEEEAAAAAEEEEEEEEESSSSSSNNNNNNNNMMMMMMMMNNNNNNNNDDDDDDDDLLLLLLLLVVVVVVVSSSSSSEEEEEEEEEYYYYYYYYYYYYQQQQQQQQQQQQQQQQQQYYYYYYYYYYYYQQQQQQQQQDDDDDDDDAAAAATTTTTTTAAAAAEEEEEEEEEEEEEEEEEEEEEEEEEEEGGGGEEEEEEEEEYYYYYYYYYYYYVVVVVVVEEEEEEEEEDDDDDDDDEEEEEEEEEDDDDDDDDEEEEEEEEEMMMMMMMMDDDDDDDDGGGGMMMMMMMMM

SEQ ID NO: 219 - protein, 3489 aa, Euplotes focardii
MMMMMMMMRRRRRRRRRRREEEEEEEEEIIIIIIIIVVVVVVVHHHHHHHHHHIIIIIIIIQQQQQQQQQAAAAAGGGGQQQQQQQQQCCCCCCGGGGNNNNNNNNQQQQQQQQQIIIIIIIIGGGGAAAAAKKKKKKKKKFFFFFFFFFFFWWWWWWWWWWWWWWEEEEEEEEEVVVVVVVIIIIIIIISSSSSSDDDDDDDDEEEEEEEEEHHHHHHHHHHGGGGVVVVVVVDDDDDDDDPPPPPPPTTTTTTTGGGGTTTTTTTYYYYYYYYYYYYHHHHHHHHHHGGGGDDDDDDDDSSSSSSDDDDDDDDLLLLLLLLQQQQQQQQQLLLLLLLLEEEEEEEEERRRRRRRRRRRIIIIIIIINNNNNNNNVVVVVVVYYYYYYYYYYYYFFFFFFFFFFFNNNNNNNNEEEEEEEEEAAAAATTTTTTTGGGGRRRRRRRRRRRKKKKKKKKKIIIIIIIICCCCCCPPPPPPPRRRRRRRRRRRAAAAAMMMMMMMMLLLLLLLLMMMMMMMMDDDDDDDDLLLLLLLLEEEEEEEEEPPPPPPPGGGGTTTTTTTMMMMMMMMDDDDDDDDSSSSSSVVVVVVVRRRRRRRRRRRAAAAAGGGGPPPPPPPFFFFFFFFFFFGGGGQQQQQQQQQLLLLLLLLFFFFFFFFFFFRRRRRRRRRRRPPPPPPPDDDDDDDDNNNNNNNNFFFFFFFFFFFVVVVVVVFFFFFFFFFFFGGGGQQQQQQQQQSSSSSSGGGGAAAAAGGGGNNNNNNNNNNNNNNNNWWWWWWWWWWWWWWAAAAAKKKKKKKKKGGGGHHHHHHHHHHYYYYYYYYYYYYTTTTTTTEEEEEEEEEGGGGAAAAAEEEEEEEEELLLLLLLLIIIIIIIIDDDDDDDDSSSSSSVVVVVVVLLLLLLLLDDDDDDDDVVVVVVVVVVVVVVRRRRRRRRRRRKKKKKKKKKEEEEEEEEEAAAAAEEEEEEEEEGGGGCCCCCCDDDDDDDDCCCCCCLLLLLLLLQQQQQQQQQGGGGFFFFFFFFFFFQQQQQQQQQIIIIIIIITTTTTTTHHHHHHHHHHSSSSSSLLLLLLLLGGGGGGGGGGGGTTTTTTTGGGGSSSSSSGGGGMMMMMMMMGGGGTTTTTTTLLLLLLLLLLLLLLLLIIIIIIIISSSSSSKKKKKKKKKIIIIIIIIRRRRRRRRRRREEEEEEEEEKKKKKKKKKYYYYYYYYYYYYPPPPPPPDDDDDDDDRRRRRRRRRRRIIIIIIIIMMMMMMMMEEEEEEEEETTTTTTTFFFFFFFFFFFSSSSSSVVVVVVVFFFFFFFFFFFPPPPPPPSSSSSSPPPPPPPKKKKKKKKKVVVVVVVSSSSSSDDDDDDDDTTTTTTTVVVVVVVVVVVVVVEEEEEEEEEPPPPPPPYYYYYYYYYYYYNNNNNNNNAAAAATTTTTTTLLLLLLLLSSSSSSVVVVVVVHHHHHHHHHHQQQQQQQQQLLLLLLLLVVVVVVVEEEEEEEEENNNNNNNNAAAAADDDDDDDDEEEEEEEEEVVVVVVVMMMMMMMMCCCCCCIIIIIIIIDDDDDDDDNNNNNNNNEEEEEEEEEAAAAALLLLLLLLYYYYYYYYYYYYDDDDDDDDIIIIIIIICCCCCCFFFFFFFFFFFRRRRRRRRRRRTTTTTTTLLLLLLLLKKKKKKKKKPPPPPPPTTTTTTTTTTTTTTPPPPPPPTTTTTTTYYYYYYYYYYYYGGGGDDDDDDDDLLLLLLLLNNNNNNNNHHHHHHHHHHLLLLLLLLVVVVVVVSSSSSSAAAAAVVVVVVVIIIIIIIISSSSSSGGGGVVVVVVVTTTTTTTSSSSSSCCCCCCLLLLLLLLRRRRRRRRRRRFFFFFFFFFFFPPPPPPPGGGGQQQQQQQQQLLLLLLLLNNNNNNNNSSSSSSDDDDDDDDLLLLLLLLRRRRRRRRRRRKKKKKKKKKLLLLLLLLAAAAAVVVVVVVNNNNNNNNLLLLLLLLIIIIIIIIPPPPPPPFFFFFFFFFFFPPPPPPPRRRRRRRRRRRLLLLLLLLHHHHHHHHHHFFFFFFFFFFFFFFFFFFFFFFMMMMMMMMIIIIIIIIGGGGFFFFFFFFFFFAAAAAPPPPPPPLLLLLLLLTTTTTTTSSSSSSRRRRRRRRRRRGGGGSSSSSSQQQQQQQQQQQQQQQQQQYYYYYYYYYYYYRRRRRRRRRRRAAAAALLLLLLLLTTTTTTTVVVVVVVPPPPPPPEEEEEEEEELLLLLLLLTTTTTTTQQQQQQQQQQQQQQQQQQMMMMMMMMFFFFFFFFFFFDDDDDDDDAAAAAKKKKKKKKKNNNNNNNNMMMMMMMMMMMMMMMMCCCCCCAAAAASSSSSSDDDDDDDDPPPPPPPRRRRRRRRRRRHHHHHHHHHHGGGGRRRRRRRRRRRYYYYYYYYYYYYLLLLLLLLTTTTTTTAAAAASSSSSSAAAAAMMMMMMMMFFFFFFFFFFFRRRRRRRRRRRGGGGRRRRRRRRRRRMMMMMMMMSSSSSSTTTTTTTKKKKKKKKKEEEEEEEEEVVVVVVVDDDDDDDDEEEEEEEEEQQQQQQQQQMMMMMMMMLLLLLLLLNNNNNNNNVVVVVVVQQQQQQQQQNNNNNNNNKKKKKKKKKNNNNNNNNSSSSSSSSSSSSYYYYYYYYYYYYFFFFFFFFFFFVVVVVVVEEEEEEEEEWWWWWWWWWWWWWWIIIIIIIIPPPPPPPNNNNNNNNNNNNNNNNIIIIIIIIKKKKKKKKKSSSSSSSSSSSSVVVVVVVCCCCCCDDDDDDDDIIIIIIIIPPPPPPPPPPPPPPKKKKKKKKKGGGGLLLLLLLLKKKKKKKKKMMMMMMMMSSSSSSSSSSSSTTTTTTTFFFFFFFFFFFIIIIIIIIGGGGNNNNNNNNSSSSSSTTTTTTTAAAAAIIIIIIIIQQQQQQQQQEEEEEEEEEMMMMMMMMFFFFFFFFFFFKKKKKKKKKRRRRRRRRRRRVVVVVVVAAAAAEEEEEEEEEQQQQQQQQQFFFFFFFFFFFTTTTTTTAAAAAMMMMMMMMFFFFFFFFFFFRRRRRRRRRRRRRRRRRRRRRRKKKKKKKKKAAAAAFFFFFFFFFFFLLLLLLLLHHHHHHHHHHWWWWWWWWWWWWWWYYYYYYYYYYYYTTTTTTTGGGGEEEEEEEEEGGGGMMMMMMMMDDDDDDDDEEEEEEEEEMMMMMMMMEEEEEEEEEFFFFFFFFFFFTTTTTTTEEEEEEEEEAAAAAEEEEEEEEESSSSSSNNNNNNNNMMMMMMMMNNNNNNNNDDDDDDDDLLLLLLLLVVVVVVVSSSSSSEEEEEEEEEYYYYYYYYYYYYQQQQQQQQQQQQQQQQQQYYYYYYYYYYYYQQQQQQQQQDDDDDDDDAAAAATTTTTTTAAAAAEEEEEEEEEEEEEEEEEEEEEEEEEEEGGGGEEEEEEEEEFFFFFFFFFFFDDDDDDDDDDDDDDDDEEEEEEEEEEEEEEEEEEEEEEEEEEEMMMMMMMMDDDDDDDDVVVVVVVV

SEQ ID NO: 220 - protein, 3478 aa, Euplotes octocarinatus
MMMMMMMMRRRRRRRRRRREEEEEEEEEIIIIIIIIVVVVVVVHHHHHHHHHHVVVVVVVQQQQQQQQQGGGGGGGGQQQQQQQQQCCCCCCGGGGNNNNNNNNQQQQQQQQQIIIIIIIIGGGGAAAAAKKKKKKKKKFFFFFFFFFFFWWWWWWWWWWWWWWEEEEEEEEEVVVVVVVIIIIIIIISSSSSSDDDDDDDDEEEEEEEEEHHHHHHHHHHGGGGVVVVVVVEEEEEEEEEPPPPPPPTTTTTTTGGGGAAAAAYYYYYYYYYYYYHHHHHHHHHHGGGGDDDDDDDDSSSSSSDDDDDDDDLLLLLLLLQQQQQQQQQLLLLLLLLEEEEEEEEERRRRRRRRRRRIIIIIIIINNNNNNNNVVVVVVVYYYYYYYYYYYYYYYYYYYYYYYYNNNNNNNNEEEEEEEEEAAAAATTTTTTTGGGGGGGGRRRRRRRRRRRYYYYYYYYYYYYVVVVVVVPPPPPPPRRRRRRRRRRRAAAAAVVVVVVVLLLLLLLLMMMMMMMMDDDDDDDDLLLLLLLLEEEEEEEEEPPPPPPPGGGGTTTTTTTMMMMMMMMDDDDDDDDSSSSSSVVVVVVVRRRRRRRRRRRAAAAAGGGGPPPPPPPFFFFFFFFFFFGGGGQQQQQQQQQLLLLLLLLFFFFFFFFFFFRRRRRRRRRRRPPPPPPPDDDDDDDDNNNNNNNNFFFFFFFFFFFVVVVVVVFFFFFFFFFFFGGGGQQQQQQQQQTTTTTTTGGGGAAAAAGGGGNNNNNNNNNNNNNNNNWWWWWWWWWWWWWWAAAAAKKKKKKKKKGGGGHHHHHHHHHHYYYYYYYYYYYYTTTTTTTEEEEEEEEEGGGGAAAAAEEEEEEEEELLLLLLLLIIIIIIIIDDDDDDDDSSSSSSVVVVVVVLLLLLLLLDDDDDDDDVVVVVVVVVVVVVVRRRRRRRRRRRKKKKKKKKKEEEEEEEEEAAAAAEEEEEEEEEGGGGCCCCCCDDDDDDDDCCCCCCLLLLLLLLQQQQQQQQQGGGGFFFFFFFFFFFQQQQQQQQQIIIIIIIITTTTTTTHHHHHHHHHHSSSSSSLLLLLLLLGGGGGGGGGGGGTTTTTTTGGGGSSSSSSGGGGMMMMMMMMGGGGTTTTTTTLLLLLLLLLLLLLLLLIIIIIIIISSSSSSKKKKKKKKKIIIIIIIIRRRRRRRRRRREEEEEEEEEEEEEEEEEEYYYYYYYYYYYYPPPPPPPDDDDDDDDRRRRRRRRRRRIIIIIIIIMMMMMMMMEEEEEEEEETTTTTTTFFFFFFFFFFFSSSSSSVVVVVVVFFFFFFFFFFFPPPPPPPSSSSSSPPPPPPPKKKKKKKKKVVVVVVVSSSSSSDDDDDDDDTTTTTTTVVVVVVVVVVVVVVEEEEEEEEEPPPPPPPYYYYYYYYYYYYNNNNNNNNAAAAATTTTTTTLLLLLLLLSSSSSSVVVVVVVHHHHHHHHHHQQQQQQQQQLLLLLLLLVVVVVVVEEEEEEEEENNNNNNNNAAAAADDDDDDDDEEEEEEEEEVVVVVVVMMMMMMMMVVVVVVVIIIIIIIIDDDDDDDDNNNNNNNNEEEEEEEEEAAAAALLLLLLLLYYYYYYYYYYYYDDDDDDDDIIIIIIIICCCCCCFFFFFFFFFFFRRRRRRRRRRRTTTTTTTLLLLLLLLKKKKKKKKKLLLLLLLLTTTTTTTTTTTTTTPPPPPPPTTTTTTTYYYYYYYYYYYYGGGGDDDDDDDDLLLLLLLLNNNNNNNNHHHHHHHHHHLLLLLLLLVVVVVVVSSSSSSAAAAACCCCCCIIIIIIIISSSSSSGGGGVVVVVVVTTTTTTTAAAAACCCCCCLLLLLLLLRRRRRRRRRRRFFFFFFFFFFFPPPPPPPGGGGQQQQQQQQQLLLLLLLLNNNNNNNNSSSSSSDDDDDDDDLLLLLLLLRRRRRRRRRRRKKKKKKKKKLLLLLLLLAAAAAVVVVVVVNNNNNNNNLLLLLLLLIIIIIIIIPPPPPPPFFFFFFFFFFFPPPPPPPRRRRRRRRRRRLLLLLLLLHHHHHHHHHHFFFFFFFFFFFFFFFFFFFFFFMMMMMMMMIIIIIIIIGGGGFFFFFFFFFFFAAAAAPPPPPPPLLLLLLLLTTTTTTTSSSSSSRRRRRRRRRRRGGGGSSSSSSQQQQQQQQQQQQQQQQQQYYYYYYYYYYYYRRRRRRRRRRRAAAAALLLLLLLLTTTTTTTVVVVVVVPPPPPPPEEEEEEEEELLLLLLLLTTTTTTTQQQQQQQQQQQQQQQQQQMMMMMMMMFFFFFFFFFFFDDDDDDDDAAAAAKKKKKKKKKNNNNNNNNMMMMMMMMMMMMMMMMSSSSSSAAAAASSSSSSDDDDDDDDPPPPPPPRRRRRRRRRRRHHHHHHHHHHGGGGRRRRRRRRRRRYYYYYYYYYYYYLLLLLLLLTTTTTTTAAAAASSSSSSAAAAAMMMMMMMMFFFFFFFFFFFRRRRRRRRRRRGGGGRRRRRRRRRRRMMMMMMMMSSSSSSTTTTTTTKKKKKKKKKEEEEEEEEEVVVVVVVDDDDDDDDEEEEEEEEEQQQQQQQQQMMMMMMMMLLLLLLLLNNNNNNNNVVVVVVVQQQQQQQQQNNNNNNNNKKKKKKKKKNNNNNNNNSSSSSSSSSSSSYYYYYYYYYYYYFFFFFFFFFFFVVVVVVVEEEEEEEEEWWWWWWWWWWWWWWIIIIIIIIPPPPPPPNNNNNNNNNNNNNNNNIIIIIIIIKKKKKKKKKSSSSSSSSSSSSVVVVVVVCCCCCCDDDDDDDDIIIIIIIIPPPPPPPPPPPPPPKKKKKKKKKGGGGLLLLLLLLKKKKKKKKKMMMMMMMMSSSSSSSSSSSSTTTTTTTFFFFFFFFFFFVVVVVVVGGGGNNNNNNNNSSSSSSTTTTTTTAAAAAIIIIIIIIQQQQQQQQQEEEEEEEEEMMMMMMMMFFFFFFFFFFFKKKKKKKKKRRRRRRRRRRRVVVVVVVAAAAAEEEEEEEEEQQQQQQQQQFFFFFFFFFFFTTTTTTTAAAAAMMMMMMMMFFFFFFFFFFFRRRRRRRRRRRRRRRRRRRRRRKKKKKKKKKAAAAAFFFFFFFFFFFLLLLLLLLHHHHHHHHHHWWWWWWWWWWWWWWYYYYYYYYYYYYTTTTTTTGGGGEEEEEEEEEGGGGMMMMMMMMDDDDDDDDEEEEEEEEEMMMMMMMMEEEEEEEEEFFFFFFFFFFFTTTTTTTEEEEEEEEEAAAAAEEEEEEEEESSSSSSNNNNNNNNMMMMMMMMNNNNNNNNDDDDDDDDLLLLLLLLVVVVVVVSSSSSSEEEEEEEEEYYYYYYYYYYYYQQQQQQQQQQQQQQQQQQYYYYYYYYYYYYQQQQQQQQQDDDDDDDDAAAAATTTTTTTAAAAAEEEEEEEEEEEEEEEEEEEEEEEEEEEGGGGEEEEEEEEEMMMMMMMMDDDDDDDDEEEEEEEEEEEEEEEEEEEEEEEEEEEGGGGAAAAAMMMMMMMMEEEEEEEEEE

SEQ ID NO: 221 - protein, 3502 aa, Giardia intestinalis
MMMMMMMMRRRRRRRRRRREEEEEEEEEIIIIIIIIVVVVVVVHHHHHHHHHHIIIIIIIIQQQQQQQQQAAAAAGGGGQQQQQQQQQCCCCCCGGGGNNNNNNNNQQQQQQQQQIIIIIIIIGGGGAAAAAKKKKKKKKKFFFFFFFFFFFWWWWWWWWWWWWWWEEEEEEEEEVVVVVVVIIIIIIIISSSSSSDDDDDDDDEEEEEEEEEHHHHHHHHHHGGGGVVVVVVVDDDDDDDDPPPPPPPSSSSSSGGGGEEEEEEEEEYYYYYYYYYYYYRRRRRRRRRRRGGGGDDDDDDDDSSSSSSEEEEEEEEELLLLLLLLQQQQQQQQQIIIIIIIIEEEEEEEEERRRRRRRRRRRIIIIIIIINNNNNNNNVVVVVVVYYYYYYYYYYYYFFFFFFFFFFFNNNNNNNNEEEEEEEEEAAAAAAAAAAGGGGGGGGRRRRRRRRRRRYYYYYYYYYYYYVVVVVVVPPPPPPPRRRRRRRRRRRAAAAAIIIIIIIILLLLLLLLVVVVVVVDDDDDDDDLLLLLLLLEEEEEEEEEPPPPPPPGGGGTTTTTTTMMMMMMMMDDDDDDDDSSSSSSVVVVVVVRRRRRRRRRRRAAAAAGGGGPPPPPPPFFFFFFFFFFFGGGGQQQQQQQQQIIIIIIIIFFFFFFFFFFFRRRRRRRRRRRPPPPPPPDDDDDDDDNNNNNNNNFFFFFFFFFFFVVVVVVVFFFFFFFFFFFGGGGQQQQQQQQQSSSSSSGGGGAAAAAGGGGNNNNNNNNNNNNNNNNWWWWWWWWWWWWWWAAAAAKKKKKKKKKGGGGHHHHHHHHHHYYYYYYYYYYYYTTTTTTTEEEEEEEEEGGGGAAAAAEEEEEEEEELLLLLLLLVVVVVVVDDDDDDDDAAAAAVVVVVVVLLLLLLLLDDDDDDDDVVVVVVVVVVVVVVRRRRRRRRRRRKKKKKKKKKRRRRRRRRRRRSSSSSSEEEEEEEEEAAAAACCCCCCDDDDDDDDCCCCCCLLLLLLLLQQQQQQQQQGGGGFFFFFFFFFFFQQQQQQQQQIIIIIIIICCCCCCHHHHHHHHHHSSSSSSLLLLLLLLGGGGGGGGGGGGTTTTTTTGGGGAAAAAGGGGMMMMMMMMGGGGTTTTTTTLLLLLLLLLLLLLLLLIIIIIIIIAAAAAKKKKKKKKKIIIIIIIIRRRRRRRRRRREEEEEEEEEEEEEEEEEEYYYYYYYYYYYYPPPPPPPDDDDDDDDRRRRRRRRRRRMMMMMMMMMMMMMMMMCCCCCCTTTTTTTFFFFFFFFFFFSSSSSSVVVVVVVVVVVVVVPPPPPPPSSSSSSPPPPPPPKKKKKKKKKVVVVVVVSSSSSSDDDDDDDDTTTTTTTVVVVVVVVVVVVVVEEEEEEEEEPPPPPPPYYYYYYYYYYYYNNNNNNNNAAAAATTTTTTTLLLLLLLLSSSSSSVVVVVVVHHHHHHHHHHQQQQQQQQQLLLLLLLLVVVVVVVEEEEEEEEEHHHHHHHHHHAAAAADDDDDDDDEEEEEEEEEVVVVVVVFFFFFFFFFFFCCCCCCIIIIIIIIDDDDDDDDNNNNNNNNEEEEEEEEEAAAAALLLLLLLLYYYYYYYYYYYYDDDDDDDDIIIIIIIICCCCCCFFFFFFFFFFFRRRRRRRRRRRTTTTTTTLLLLLLLLKKKKKKKKKLLLLLLLLTTTTTTTCCCCCCPPPPPPPTTTTTTTYYYYYYYYYYYYGGGGDDDDDDDDLLLLLLLLNNNNNNNNHHHHHHHHHHLLLLLLLLVVVVVVVSSSSSSLLLLLLLLVVVVVVVMMMMMMMMSSSSSSGGGGCCCCCCTTTTTTTSSSSSSCCCCCCLLLLLLLLRRRRRRRRRRRFFFFFFFFFFFPPPPPPPGGGGQQQQQQQQQLLLLLLLLNNNNNNNNAAAAADDDDDDDDLLLLLLLLRRRRRRRRRRRKKKKKKKKKLLLLLLLLAAAAAVVVVVVVNNNNNNNNLLLLLLLLIIIIIIIIPPPPPPPFFFFFFFFFFFPPPPPPPRRRRRRRRRRRLLLLLLLLHHHHHHHHHHFFFFFFFFFFFFFFFFFFFFFFLLLLLLLLVVVVVVVGGGGFFFFFFFFFFFAAAAAPPPPPPPLLLLLLLLTTTTTTTSSSSSSRRRRRRRRRRRGGGGSSSSSSQQQQQQQQQIIIIIIIIYYYYYYYYYYYYRRRRRRRRRRRAAAAALLLLLLLLTTTTTTTVVVVVVVPPPPPPPEEEEEEEEELLLLLLLLVVVVVVVSSSSSSQQQQQQQQQMMMMMMMMFFFFFFFFFFFDDDDDDDDNNNNNNNNKKKKKKKKKNNNNNNNNMMMMMMMMMMMMMMMMAAAAAAAAAASSSSSSDDDDDDDDPPPPPPPRRRRRRRRRRRHHHHHHHHHHGGGGRRRRRRRRRRRYYYYYYYYYYYYLLLLLLLLTTTTTTTAAAAAAAAAAAAAAAMMMMMMMMFFFFFFFFFFFRRRRRRRRRRRGGGGRRRRRRRRRRRMMMMMMMMSSSSSSTTTTTTTKKKKKKKKKEEEEEEEEEVVVVVVVDDDDDDDDEEEEEEEEEQQQQQQQQQMMMMMMMMLLLLLLLLNNNNNNNNIIIIIIIIQQQQQQQQQNNNNNNNNKKKKKKKKKNNNNNNNNSSSSSSSSSSSSYYYYYYYYYYYYFFFFFFFFFFFVVVVVVVEEEEEEEEEWWWWWWWWWWWWWWIIIIIIIIPPPPPPPNNNNNNNNNNNNNNNNMMMMMMMMKKKKKKKKKVVVVVVVSSSSSSVVVVVVVCCCCCCDDDDDDDDIIIIIIIIPPPPPPPPPPPPPPRRRRRRRRRRRGGGGLLLLLLLLKKKKKKKKKMMMMMMMMAAAAAAAAAATTTTTTTFFFFFFFFFFFIIIIIIIIGGGGNNNNNNNNSSSSSSTTTTTTTCCCCCCIIIIIIIIQQQQQQQQQEEEEEEEEELLLLLLLLFFFFFFFFFFFKKKKKKKKKRRRRRRRRRRRVVVVVVVGGGGEEEEEEEEEQQQQQQQQQFFFFFFFFFFFSSSSSSAAAAAMMMMMMMMFFFFFFFFFFFRRRRRRRRRRRRRRRRRRRRRRKKKKKKKKKAAAAAFFFFFFFFFFFLLLLLLLLHHHHHHHHHHWWWWWWWWWWWWWWYYYYYYYYYYYYTTTTTTTGGGGEEEEEEEEEGGGGMMMMMMMMDDDDDDDDEEEEEEEEEMMMMMMMMEEEEEEEEEFFFFFFFFFFFTTTTTTTEEEEEEEEEAAAAAEEEEEEEEESSSSSSNNNNNNNNMMMMMMMMNNNNNNNNDDDDDDDDLLLLLLLLVVVVVVVSSSSSSEEEEEEEEEYYYYYYYYYYYYQQQQQQQQQQQQQQQQQQYYYYYYYYYYYYQQQQQQQQQEEEEEEEEEAAAAAGGGGVVVVVVVDDDDDDDDEEEEEEEEEGGGGEEEEEEEEEEEEEEEEEEFFFFFFFFFFFEEEEEEEEEEEEEEEEEEEEEEEEEEEEEEEEEEEEDDDDDDDDFFFFFFFFFFFGGGGDDDDDDDDEEEEEEEEEQQQQQQQQQQ

SEQ ID NO: 222 - protein, 3499 aa, Gibberella fujikuroi
MMMMMMMMRRRRRRRRRRREEEEEEEEEIIIIIIIIVVVVVVVHHHHHHHHHHLLLLLLLLQQQQQQQQQTTTTTTTGGGGQQQQQQQQQCCCCCCGGGGNNNNNNNNQQQQQQQQQIIIIIIIIGGGGAAAAAAAAAAFFFFFFFFFFFWWWWWWWWWWWWWWQQQQQQQQQTTTTTTTIIIIIIIISSSSSSGGGGEEEEEEEEEHHHHHHHHHHGGGGLLLLLLLLDDDDDDDDSSSSSSNNNNNNNNGGGGVVVVVVVYYYYYYYYYYYYNNNNNNNNGGGGTTTTTTTSSSSSSEEEEEEEEELLLLLLLLQQQQQQQQQLLLLLLLLEEEEEEEEERRRRRRRRRRRMMMMMMMMSSSSSSVVVVVVVYYYYYYYYYYYYFFFFFFFFFFFNNNNNNNNEEEEEEEEERRRRRRRRRRRSSSSSSGGGGNNNNNNNNKKKKKKKKKYYYYYYYYYYYYVVVVVVVPPPPPPPRRRRRRRRRRRAAAAAVVVVVVVLLLLLLLLVVVVVVVDDDDDDDDLLLLLLLLEEEEEEEEEPPPPPPPGGGGTTTTTTTMMMMMMMMDDDDDDDDAAAAAVVVVVVVRRRRRRRRRRRAAAAAGGGGPPPPPPPFFFFFFFFFFFGGGGQQQQQQQQQLLLLLLLLFFFFFFFFFFFRRRRRRRRRRRPPPPPPPDDDDDDDDNNNNNNNNFFFFFFFFFFFVVVVVVVFFFFFFFFFFFGGGGQQQQQQQQQSSSSSSGGGGAAAAAGGGGNNNNNNNNNNNNNNNNWWWWWWWWWWWWWWAAAAAKKKKKKKKKGGGGHHHHHHHHHHYYYYYYYYYYYYTTTTTTTEEEEEEEEEGGGGAAAAAEEEEEEEEELLLLLLLLVVVVVVVDDDDDDDDQQQQQQQQQVVVVVVVLLLLLLLLDDDDDDDDVVVVVVVVVVVVVVRRRRRRRRRRRRRRRRRRRRRREEEEEEEEEAAAAAEEEEEEEEEGGGGCCCCCCDDDDDDDDCCCCCCLLLLLLLLQQQQQQQQQGGGGFFFFFFFFFFFQQQQQQQQQIIIIIIIITTTTTTTHHHHHHHHHHSSSSSSLLLLLLLLGGGGGGGGGGGGTTTTTTTGGGGAAAAAGGGGMMMMMMMMGGGGTTTTTTTLLLLLLLLLLLLLLLLIIIIIIIISSSSSSKKKKKKKKKIIIIIIIIRRRRRRRRRRREEEEEEEEEEEEEEEEEEFFFFFFFFFFFPPPPPPPDDDDDDDDRRRRRRRRRRRMMMMMMMMMMMMMMMMAAAAATTTTTTTFFFFFFFFFFFSSSSSSVVVVVVVVVVVVVVPPPPPPPSSSSSSPPPPPPPKKKKKKKKKVVVVVVVSSSSSSDDDDDDDDTTTTTTTVVVVVVVVVVVVVVEEEEEEEEEPPPPPPPYYYYYYYYYYYYNNNNNNNNAAAAATTTTTTTLLLLLLLLSSSSSSVVVVVVVHHHHHHHHHHQQQQQQQQQLLLLLLLLVVVVVVVEEEEEEEEENNNNNNNNSSSSSSDDDDDDDDEEEEEEEEETTTTTTTFFFFFFFFFFFCCCCCCIIIIIIIIDDDDDDDDNNNNNNNNEEEEEEEEEAAAAALLLLLLLLYYYYYYYYYYYYDDDDDDDDIIIIIIIICCCCCCMMMMMMMMRRRRRRRRRRRTTTTTTTLLLLLLLLKKKKKKKKKLLLLLLLLSSSSSSNNNNNNNNPPPPPPPSSSSSSYYYYYYYYYYYYGGGGDDDDDDDDLLLLLLLLNNNNNNNNYYYYYYYYYYYYLLLLLLLLVVVVVVVSSSSSSAAAAAVVVVVVVMMMMMMMMSSSSSSGGGGVVVVVVVTTTTTTTTTTTTTTCCCCCCLLLLLLLLRRRRRRRRRRRFFFFFFFFFFFPPPPPPPGGGGQQQQQQQQQLLLLLLLLNNNNNNNNSSSSSSDDDDDDDDLLLLLLLLRRRRRRRRRRRKKKKKKKKKLLLLLLLLAAAAAVVVVVVVNNNNNNNNMMMMMMMMVVVVVVVPPPPPPPFFFFFFFFFFFPPPPPPPRRRRRRRRRRRLLLLLLLLHHHHHHHHHHFFFFFFFFFFFFFFFFFFFFFFMMMMMMMMVVVVVVVGGGGFFFFFFFFFFFAAAAAPPPPPPPLLLLLLLLTTTTTTTSSSSSSRRRRRRRRRRRGGGGAAAAAHHHHHHHHHHSSSSSSFFFFFFFFFFFRRRRRRRRRRRAAAAAVVVVVVVSSSSSSVVVVVVVPPPPPPPEEEEEEEEELLLLLLLLTTTTTTTQQQQQQQQQQQQQQQQQQMMMMMMMMFFFFFFFFFFFDDDDDDDDPPPPPPPKKKKKKKKKNNNNNNNNMMMMMMMMMMMMMMMMAAAAAAAAAASSSSSSDDDDDDDDFFFFFFFFFFFRRRRRRRRRRRNNNNNNNNGGGGRRRRRRRRRRRYYYYYYYYYYYYLLLLLLLLTTTTTTTCCCCCCSSSSSSAAAAAIIIIIIIIFFFFFFFFFFFRRRRRRRRRRRGGGGRRRRRRRRRRRVVVVVVVAAAAAMMMMMMMMKKKKKKKKKEEEEEEEEEVVVVVVVEEEEEEEEEDDDDDDDDQQQQQQQQQMMMMMMMMRRRRRRRRRRRNNNNNNNNVVVVVVVQQQQQQQQQNNNNNNNNKKKKKKKKKNNNNNNNNSSSSSSSSSSSSYYYYYYYYYYYYFFFFFFFFFFFVVVVVVVEEEEEEEEEWWWWWWWWWWWWWWIIIIIIIIPPPPPPPNNNNNNNNNNNNNNNNIIIIIIIIQQQQQQQQQTTTTTTTAAAAALLLLLLLLCCCCCCAAAAAIIIIIIIIPPPPPPPPPPPPPPRRRRRRRRRRRGGGGLLLLLLLLTTTTTTTMMMMMMMMSSSSSSSSSSSSTTTTTTTFFFFFFFFFFFIIIIIIIIGGGGNNNNNNNNSSSSSSTTTTTTTSSSSSSIIIIIIIIQQQQQQQQQEEEEEEEEELLLLLLLLFFFFFFFFFFFKKKKKKKKKRRRRRRRRRRRVVVVVVVGGGGEEEEEEEEEQQQQQQQQQFFFFFFFFFFFTTTTTTTAAAAAMMMMMMMMFFFFFFFFFFFRRRRRRRRRRRRRRRRRRRRRRKKKKKKKKKAAAAAFFFFFFFFFFFLLLLLLLLHHHHHHHHHHWWWWWWWWWWWWWWYYYYYYYYYYYYTTTTTTTGGGGEEEEEEEEEGGGGMMMMMMMMDDDDDDDDEEEEEEEEEMMMMMMMMEEEEEEEEEFFFFFFFFFFFTTTTTTTEEEEEEEEEAAAAAEEEEEEEEESSSSSSNNNNNNNNMMMMMMMMNNNNNNNNDDDDDDDDLLLLLLLLVVVVVVVSSSSSSEEEEEEEEEYYYYYYYYYYYYQQQQQQQQQQQQQQQQQQYYYYYYYYYYYYQQQQQQQQQDDDDDDDDAAAAAGGGGIIIIIIIIDDDDDDDDEEEEEEEEEEEEEEEEEEEEEEEEEEEEEEEEEEEEEEEEEEEEEYYYYYYYYYYYYEEEEEEEEEEEEEEEEEEEEEEEEEEELLLLLLLLPPPPPPPEEEEEEEEEGGGGEEEEEEEEEEEEEEEEEEE

SEQ ID NO: 223 - protein, 2676 aa, Haliotis discus
SSSSSSVVVVVVVRRRRRRRRRRRSSSSSSGGGGPPPPPPPFFFFFFFFFFFGGGGQQQQQQQQQIIIIIIIIFFFFFFFFFFFRRRRRRRRRRRPPPPPPPDDDDDDDDNNNNNNNNFFFFFFFFFFFVVVVVVVFFFFFFFFFFFGGGGQQQQQQQQQSSSSSSGGGGAAAAAGGGGNNNNNNNNNNNNNNNNWWWWWWWWWWWWWWAAAAAKKKKKKKKKGGGGHHHHHHHHHHYYYYYYYYYYYYTTTTTTTEEEEEEEEEGGGGAAAAAEEEEEEEEELLLLLLLLVVVVVVVDDDDDDDDSSSSSSVVVVVVVLLLLLLLLDDDDDDDDVVVVVVVVVVVVVVRRRRRRRRRRRKKKKKKKKKEEEEEEEEEAAAAAEEEEEEEEESSSSSSCCCCCCDDDDDDDDCCCCCCLLLLLLLLQQQQQQQQQGGGGFFFFFFFFFFFQQQQQQQQQLLLLLLLLTTTTTTTHHHHHHHHHHSSSSSSLLLLLLLLGGGGGGGGGGGGTTTTTTTGGGGSSSSSSGGGGMMMMMMMMGGGGTTTTTTTLLLLLLLLLLLLLLLLIIIIIIIISSSSSSKKKKKKKKKIIIIIIIIRRRRRRRRRRREEEEEEEEEEEEEEEEEEYYYYYYYYYYYYPPPPPPPDDDDDDDDRRRRRRRRRRRIIIIIIIIMMMMMMMMNNNNNNNNTTTTTTTFFFFFFFFFFFSSSSSSVVVVVVVVVVVVVVPPPPPPPSSSSSSPPPPPPPKKKKKKKKKVVVVVVVSSSSSSDDDDDDDDTTTTTTTVVVVVVVVVVVVVVEEEEEEEEEPPPPPPPYYYYYYYYYYYYNNNNNNNNAAAAATTTTTTTLLLLLLLLSSSSSSVVVVVVVHHHHHHHHHHQQQQQQQQQLLLLLLLLVVVVVVVEEEEEEEEENNNNNNNNTTTTTTTDDDDDDDDEEEEEEEEETTTTTTTYYYYYYYYYYYYCCCCCCIIIIIIIIDDDDDDDDNNNNNNNNEEEEEEEEEAAAAALLLLLLLLYYYYYYYYYYYYDDDDDDDDIIIIIIIICCCCCCFFFFFFFFFFFRRRRRRRRRRRTTTTTTTLLLLLLLLKKKKKKKKKLLLLLLLLTTTTTTTTTTTTTTPPPPPPPTTTTTTTYYYYYYYYYYYYGGGGDDDDDDDDLLLLLLLLNNNNNNNNHHHHHHHHHHLLLLLLLLVVVVVVVSSSSSSAAAAATTTTTTTMMMMMMMMSSSSSSGGGGVVVVVVVTTTTTTTTTTTTTTCCCCCCLLLLLLLLRRRRRRRRRRRFFFFFFFFFFFPPPPPPPGGGGQQQQQQQQQLLLLLLLLNNNNNNNNAAAAADDDDDDDDLLLLLLLLRRRRRRRRRRRKKKKKKKKKLLLLLLLLAAAAAVVVVVVVNNNNNNNNMMMMMMMMVVVVVVVPPPPPPPFFFFFFFFFFFPPPPPPPRRRRRRRRRRRLLLLLLLLHHHHHHHHHHFFFFFFFFFFFFFFFFFFFFFFMMMMMMMMPPPPPPPGGGGFFFFFFFFFFFAAAAAPPPPPPPLLLLLLLLTTTTTTTSSSSSSRRRRRRRRRRRGGGGSSSSSSQQQQQQQQQQQQQQQQQQYYYYYYYYYYYYRRRRRRRRRRRAAAAALLLLLLLLTTTTTTTVVVVVVVPPPPPPPEEEEEEEEELLLLLLLLTTTTTTTQQQQQQQQQQQQQQQQQQMMMMMMMMFFFFFFFFFFFDDDDDDDDAAAAAKKKKKKKKKNNNNNNNNMMMMMMMMMMMMMMMMAAAAAAAAAACCCCCCDDDDDDDDPPPPPPPRRRRRRRRRRRHHHHHHHHHHGGGGRRRRRRRRRRRYYYYYYYYYYYYLLLLLLLLTTTTTTTVVVVVVVAAAAAAAAAAIIIIIIIIFFFFFFFFFFFRRRRRRRRRRRGGGGRRRRRRRRRRRMMMMMMMMSSSSSSMMMMMMMMKKKKKKKKKEEEEEEEEEVVVVVVVDDDDDDDDEEEEEEEEEQQQQQQQQQMMMMMMMMLLLLLLLLNNNNNNNNVVVVVVVQQQQQQQQQNNNNNNNNKKKKKKKKKNNNNNNNNSSSSSSSSSSSSYYYYYYYYYYYYFFFFFFFFFFFVVVVVVVEEEEEEEEEWWWWWWWWWWWWWWIIIIIIIIPPPPPPPNNNNNNNNNNNNNNNNVVVVVVVKKKKKKKKKTTTTTTTAAAAAVVVVVVVCCCCCCDDDDDDDDIIIIIIIIPPPPPPPPPPPPPPRRRRRRRRRRRGGGGLLLLLLLLKKKKKKKKKMMMMMMMMSSSSSSAAAAATTTTTTTFFFFFFFFFFFIIIIIIIIGGGGNNNNNNNNSSSSSSTTTTTTTAAAAAIIIIIIIIQQQQQQQQQEEEEEEEEELLLLLLLLFFFFFFFFFFFKKKKKKKKKRRRRRRRRRRRIIIIIIIISSSSSSEEEEEEEEEQQQQQQQQQFFFFFFFFFFFTTTTTTTAAAAAMMMMMMMMFFFFFFFFFFFRRRRRRRRRRRRRRRRRRRRRRKKKKKKKKKAAAAAFFFFFFFFFFFLLLLLLLLHHHHHHHHHHWWWWWWWWWWWWWWYYYYYYYYYYYYTTTTTTTGGGGEEEEEEEEEGGGGMMMMMMMMDDDDDDDDEEEEEEEEEMMMMMMMMEEEEEEEEEFFFFFFFFFFFTTTTTTTEEEEEEEEEAAAAAEEEEEEEEESSSSSSNNNNNNNNMMMMMMMMM

SEQ ID NO: 224 - protein, 3511 aa, Hordeum vulgare
MMMMMMMMRRRRRRRRRRREEEEEEEEEIIIIIIIILLLLLLLLHHHHHHHHHHIIIIIIIIQQQQQQQQQGGGGGGGGQQQQQQQQQCCCCCCGGGGNNNNNNNNQQQQQQQQQIIIIIIIIGGGGAAAAAKKKKKKKKKFFFFFFFFFFFWWWWWWWWWWWWWWEEEEEEEEEVVVVVVVVVVVVVVCCCCCCDDDDDDDDEEEEEEEEEHHHHHHHHHHGGGGIIIIIIIIDDDDDDDDPPPPPPPTTTTTTTGGGGRRRRRRRRRRRYYYYYYYYYYYYTTTTTTTGGGGTTTTTTTSSSSSSDDDDDDDDLLLLLLLLQQQQQQQQQLLLLLLLLEEEEEEEEERRRRRRRRRRRVVVVVVVNNNNNNNNVVVVVVVYYYYYYYYYYYYYYYYYYYYYYYYNNNNNNNNEEEEEEEEEAAAAASSSSSSCCCCCCGGGGRRRRRRRRRRRFFFFFFFFFFFVVVVVVVPPPPPPPRRRRRRRRRRRAAAAAVVVVVVVLLLLLLLLMMMMMMMMDDDDDDDDLLLLLLLLEEEEEEEEEPPPPPPPGGGGTTTTTTTMMMMMMMMDDDDDDDDSSSSSSVVVVVVVRRRRRRRRRRRTTTTTTTGGGGPPPPPPPYYYYYYYYYYYYGGGGQQQQQQQQQIIIIIIIIFFFFFFFFFFFRRRRRRRRRRRPPPPPPPDDDDDDDDNNNNNNNNFFFFFFFFFFFVVVVVVVFFFFFFFFFFFGGGGQQQQQQQQQSSSSSSGGGGAAAAAGGGGNNNNNNNNNNNNNNNNWWWWWWWWWWWWWWAAAAAKKKKKKKKKGGGGHHHHHHHHHHYYYYYYYYYYYYTTTTTTTEEEEEEEEEGGGGAAAAAEEEEEEEEELLLLLLLLIIIIIIIIDDDDDDDDSSSSSSVVVVVVVLLLLLLLLDDDDDDDDVVVVVVVVVVVVVVRRRRRRRRRRRKKKKKKKKKEEEEEEEEEAAAAAEEEEEEEEENNNNNNNNCCCCCCDDDDDDDDCCCCCCLLLLLLLLQQQQQQQQQGGGGFFFFFFFFFFFQQQQQQQQQVVVVVVVCCCCCCHHHHHHHHHHSSSSSSLLLLLLLLGGGGGGGGGGGGTTTTTTTGGGGSSSSSSGGGGMMMMMMMMGGGGTTTTTTTLLLLLLLLLLLLLLLLIIIIIIIISSSSSSKKKKKKKKKIIIIIIIIRRRRRRRRRRREEEEEEEEEEEEEEEEEEYYYYYYYYYYYYPPPPPPPDDDDDDDDRRRRRRRRRRRMMMMMMMMMMMMMMMMLLLLLLLLTTTTTTTFFFFFFFFFFFSSSSSSVVVVVVVFFFFFFFFFFFPPPPPPPSSSSSSPPPPPPPKKKKKKKKKVVVVVVVSSSSSSDDDDDDDDTTTTTTTVVVVVVVVVVVVVVEEEEEEEEEPPPPPPPYYYYYYYYYYYYNNNNNNNNAAAAATTTTTTTLLLLLLLLSSSSSSVVVVVVVHHHHHHHHHHQQQQQQQQQLLLLLLLLVVVVVVVEEEEEEEEENNNNNNNNAAAAADDDDDDDDEEEEEEEEECCCCCCMMMMMMMMVVVVVVVLLLLLLLLDDDDDDDDNNNNNNNNEEEEEEEEEAAAAALLLLLLLLYYYYYYYYYYYYDDDDDDDDIIIIIIIICCCCCCFFFFFFFFFFFRRRRRRRRRRRTTTTTTTLLLLLLLLKKKKKKKKKLLLLLLLLTTTTTTTTTTTTTTPPPPPPPSSSSSSFFFFFFFFFFFGGGGDDDDDDDDLLLLLLLLNNNNNNNNHHHHHHHHHHLLLLLLLLIIIIIIIISSSSSSAAAAATTTTTTTMMMMMMMMSSSSSSGGGGVVVVVVVTTTTTTTCCCCCCCCCCCCLLLLLLLLRRRRRRRRRRRFFFFFFFFFFFPPPPPPPGGGGQQQQQQQQQLLLLLLLLNNNNNNNNSSSSSSDDDDDDDDLLLLLLLLRRRRRRRRRRRKKKKKKKKKLLLLLLLLAAAAAVVVVVVVNNNNNNNNLLLLLLLLIIIIIIIIPPPPPPPFFFFFFFFFFFPPPPPPPRRRRRRRRRRRLLLLLLLLHHHHHHHHHHFFFFFFFFFFFFFFFFFFFFFFMMMMMMMMVVVVVVVGGGGFFFFFFFFFFFAAAAAPPPPPPPLLLLLLLLTTTTTTTSSSSSSRRRRRRRRRRRGGGGSSSSSSQQQQQQQQQQQQQQQQQQYYYYYYYYYYYYRRRRRRRRRRRAAAAALLLLLLLLTTTTTTTVVVVVVVPPPPPPPEEEEEEEEELLLLLLLLTTTTTTTQQQQQQQQQQQQQQQQQQMMMMMMMMWWWWWWWWWWWWWWDDDDDDDDAAAAAKKKKKKKKKNNNNNNNNMMMMMMMMMMMMMMMMCCCCCCAAAAAAAAAADDDDDDDDPPPPPPPRRRRRRRRRRRHHHHHHHHHHGGGGRRRRRRRRRRRYYYYYYYYYYYYLLLLLLLLTTTTTTTAAAAASSSSSSAAAAAMMMMMMMMFFFFFFFFFFFRRRRRRRRRRRGGGGKKKKKKKKKMMMMMMMMSSSSSSTTTTTTTKKKKKKKKKEEEEEEEEEVVVVVVVDDDDDDDDEEEEEEEEEQQQQQQQQQMMMMMMMMIIIIIIIINNNNNNNNVVVVVVVQQQQQQQQQNNNNNNNNKKKKKKKKKNNNNNNNNSSSSSSSSSSSSYYYYYYYYYYYYFFFFFFFFFFFVVVVVVVEEEEEEEEEWWWWWWWWWWWWWWIIIIIIIIPPPPPPPNNNNNNNNNNNNNNNNVVVVVVVKKKKKKKKKSSSSSSSSSSSSVVVVVVVCCCCCCDDDDDDDDIIIIIIIIPPPPPPPPPPPPPPTTTTTTTGGGGLLLLLLLLSSSSSSMMMMMMMMAAAAASSSSSSTTTTTTTFFFFFFFFFFFVVVVVVVGGGGNNNNNNNNSSSSSSTTTTTTTSSSSSSIIIIIIIIQQQQQQQQQEEEEEEEEEMMMMMMMMFFFFFFFFFFFRRRRRRRRRRRRRRRRRRRRRRVVVVVVVSSSSSSEEEEEEEEEQQQQQQQQQFFFFFFFFFFFTTTTTTTAAAAAMMMMMMMMFFFFFFFFFFFRRRRRRRRRRRRRRRRRRRRRRKKKKKKKKKAAAAAFFFFFFFFFFFLLLLLLLLHHHHHHHHHHWWWWWWWWWWWWWWYYYYYYYYYYYYTTTTTTTGGGGEEEEEEEEEGGGGMMMMMMMMDDDDDDDDEEEEEEEEEMMMMMMMMEEEEEEEEEFFFFFFFFFFFTTTTTTTEEEEEEEEEAAAAAEEEEEEEEESSSSSSNNNNNNNNMMMMMMMMNNNNNNNNDDDDDDDDLLLLLLLLVVVVVVVSSSSSSEEEEEEEEEYYYYYYYYYYYYQQQQQQQQQQQQQQQQQQYYYYYYYYYYYYQQQQQQQQQDDDDDDDDAAAAATTTTTTTAAAAADDDDDDDDEEEEEEEEEEEEEEEEEEGGGGEEEEEEEEEYYYYYYYYYYYYEEEEEEEEEDDDDDDDDEEEEEEEEEDDDDDDDDQQQQQQQQQEEEEEEEEEAAAAAEEEEEEEEEDDDDDDDDDDDDDDDDMMMMMMMMM

SEQ ID NO: 225 - protein, 3503 aa, Leishmania mexicana
MMMMMMMMRRRRRRRRRRREEEEEEEEEIIIIIIIIVVVVVVVSSSSSSCCCCCCQQQQQQQQQAAAAAGGGGQQQQQQQQQCCCCCCGGGGNNNNNNNNQQQQQQQQQIIIIIIIIGGGGSSSSSSKKKKKKKKKFFFFFFFFFFFWWWWWWWWWWWWWWEEEEEEEEEVVVVVVVIIIIIIIIAAAAADDDDDDDDEEEEEEEEEHHHHHHHHHHGGGGVVVVVVVDDDDDDDDPPPPPPPTTTTTTTGGGGSSSSSSYYYYYYYYYYYYQQQQQQQQQGGGGDDDDDDDDSSSSSSDDDDDDDDLLLLLLLLQQQQQQQQQLLLLLLLLEEEEEEEEERRRRRRRRRRRIIIIIIIINNNNNNNNVVVVVVVYYYYYYYYYYYYFFFFFFFFFFFDDDDDDDDEEEEEEEEESSSSSSAAAAAGGGGGGGGRRRRRRRRRRRYYYYYYYYYYYYVVVVVVVPPPPPPPRRRRRRRRRRRAAAAAVVVVVVVLLLLLLLLMMMMMMMMDDDDDDDDLLLLLLLLEEEEEEEEEPPPPPPPGGGGTTTTTTTMMMMMMMMDDDDDDDDSSSSSSVVVVVVVRRRRRRRRRRRAAAAAGGGGPPPPPPPYYYYYYYYYYYYGGGGQQQQQQQQQLLLLLLLLFFFFFFFFFFFRRRRRRRRRRRPPPPPPPDDDDDDDDNNNNNNNNFFFFFFFFFFFIIIIIIIIFFFFFFFFFFFGGGGQQQQQQQQQSSSSSSGGGGAAAAAGGGGNNNNNNNNNNNNNNNNWWWWWWWWWWWWWWAAAAAKKKKKKKKKGGGGHHHHHHHHHHYYYYYYYYYYYYTTTTTTTEEEEEEEEEGGGGAAAAAEEEEEEEEELLLLLLLLIIIIIIIIDDDDDDDDSSSSSSVVVVVVVLLLLLLLLDDDDDDDDVVVVVVVCCCCCCRRRRRRRRRRRKKKKKKKKKEEEEEEEEEAAAAAEEEEEEEEESSSSSSCCCCCCDDDDDDDDCCCCCCLLLLLLLLQQQQQQQQQGGGGFFFFFFFFFFFQQQQQQQQQLLLLLLLLSSSSSSHHHHHHHHHHSSSSSSLLLLLLLLGGGGGGGGGGGGTTTTTTTGGGGSSSSSSGGGGMMMMMMMMGGGGTTTTTTTLLLLLLLLLLLLLLLLIIIIIIIISSSSSSKKKKKKKKKLLLLLLLLRRRRRRRRRRREEEEEEEEEEEEEEEEEEYYYYYYYYYYYYPPPPPPPDDDDDDDDRRRRRRRRRRRIIIIIIIIMMMMMMMMMMMMMMMMTTTTTTTFFFFFFFFFFFSSSSSSVVVVVVVIIIIIIIIPPPPPPPSSSSSSPPPPPPPRRRRRRRRRRRVVVVVVVSSSSSSDDDDDDDDTTTTTTTVVVVVVVVVVVVVVEEEEEEEEEPPPPPPPYYYYYYYYYYYYNNNNNNNNTTTTTTTTTTTTTTLLLLLLLLSSSSSSVVVVVVVHHHHHHHHHHQQQQQQQQQLLLLLLLLVVVVVVVEEEEEEEEENNNNNNNNSSSSSSDDDDDDDDEEEEEEEEESSSSSSMMMMMMMMCCCCCCIIIIIIIIDDDDDDDDNNNNNNNNEEEEEEEEEAAAAALLLLLLLLYYYYYYYYYYYYDDDDDDDDIIIIIIIICCCCCCFFFFFFFFFFFRRRRRRRRRRRTTTTTTTLLLLLLLLKKKKKKKKKLLLLLLLLTTTTTTTTTTTTTTPPPPPPPTTTTTTTFFFFFFFFFFFGGGGDDDDDDDDLLLLLLLLNNNNNNNNHHHHHHHHHHLLLLLLLLVVVVVVVAAAAAAAAAAVVVVVVVMMMMMMMMSSSSSSGGGGVVVVVVVTTTTTTTCCCCCCCCCCCCLLLLLLLLRRRRRRRRRRRFFFFFFFFFFFPPPPPPPGGGGQQQQQQQQQLLLLLLLLNNNNNNNNSSSSSSDDDDDDDDLLLLLLLLRRRRRRRRRRRNNNNNNNNRRRRRRRRRRRLLLLLLLLAAAAAVVVVVVVNNNNNNNNLLLLLLLLVVVVVVVPPPPPPPFFFFFFFFFFFPPPPPPPRRRRRRRRRRRLLLLLLLLHHHHHHHHHHFFFFFFFFFFFFFFFFFFFFFFMMMMMMMMMMMMMMMMGGGGFFFFFFFFFFFAAAAAPPPPPPPLLLLLLLLTTTTTTTSSSSSSRRRRRRRRRRRGGGGSSSSSSQQQQQQQQQEEEEEEEEEYYYYYYYYYYYYRRRRRRRRRRRQQQQQQQQQGGGGLLLLLLLLSSSSSSVVVVVVVAAAAADDDDDDDDVVVVVVVTTTTTTTQQQQQQQQQQQQQQQQQQMMMMMMMMFFFFFFFFFFFDDDDDDDDAAAAAKKKKKKKKKNNNNNNNNMMMMMMMMMMMMMMMMQQQQQQQQQAAAAAAAAAADDDDDDDDPPPPPPPRRRRRRRRRRRHHHHHHHHHHGGGGRRRRRRRRRRRYYYYYYYYYYYYLLLLLLLLTTTTTTTAAAAASSSSSSAAAAALLLLLLLLFFFFFFFFFFFRRRRRRRRRRRGGGGRRRRRRRRRRRMMMMMMMMSSSSSSTTTTTTTKKKKKKKKKEEEEEEEEEVVVVVVVDDDDDDDDEEEEEEEEEQQQQQQQQQMMMMMMMMLLLLLLLLNNNNNNNNVVVVVVVQQQQQQQQQNNNNNNNNKKKKKKKKKNNNNNNNNSSSSSSSSSSSSYYYYYYYYYYYYFFFFFFFFFFFIIIIIIIIEEEEEEEEEWWWWWWWWWWWWWWIIIIIIIIPPPPPPPNNNNNNNNNNNNNNNNIIIIIIIIKKKKKKKKKSSSSSSSSSSSSIIIIIIIICCCCCCDDDDDDDDIIIIIIIIPPPPPPPPPPPPPPKKKKKKKKKGGGGLLLLLLLLKKKKKKKKKMMMMMMMMSSSSSSVVVVVVVTTTTTTTFFFFFFFFFFFIIIIIIIIGGGGNNNNNNNNNNNNNNNNTTTTTTTCCCCCCIIIIIIIIQQQQQQQQQEEEEEEEEEMMMMMMMMFFFFFFFFFFFRRRRRRRRRRRRRRRRRRRRRRVVVVVVVGGGGEEEEEEEEEQQQQQQQQQFFFFFFFFFFFTTTTTTTGGGGMMMMMMMMFFFFFFFFFFFRRRRRRRRRRRRRRRRRRRRRRKKKKKKKKKRRRRRRRRRRRFFFFFFFFFFFLLLLLLLLHHHHHHHHHHWWWWWWWWWWWWWWYYYYYYYYYYYYTTTTTTTGGGGEEEEEEEEEGGGGMMMMMMMMDDDDDDDDEEEEEEEEEMMMMMMMMEEEEEEEEEFFFFFFFFFFFTTTTTTTEEEEEEEEEAAAAAEEEEEEEEESSSSSSNNNNNNNNMMMMMMMMNNNNNNNNDDDDDDDDLLLLLLLLVVVVVVVSSSSSSEEEEEEEEEYYYYYYYYYYYYQQQQQQQQQQQQQQQQQQYYYYYYYYYYYYQQQQQQQQQDDDDDDDDAAAAATTTTTTTVVVVVVVEEEEEEEEEEEEEEEEEEEEEEEEEEEGGGGEEEEEEEEEFFFFFFFFFFFDDDDDDDDEEEEEEEEEEEEEEEEEEEEEEEEEEEEEEEEEEEEAAAAAYYYYYYYYYYYYY

SEQ ID NO: 226 - protein, 901 aa, Lymnaea stagnalis
SSSSSSYYYYYYYYYYYYFFFFFFFFFFFVVVVVVVEEEEEEEEEWWWWWWWWWWWWWWIIIIIIIIPPPPPPPNNNNNNNNNNNNNNNNVVVVVVVKKKKKKKKKTTTTTTTAAAAAVVVVVVVCCCCCCDDDDDDDDIIIIIIIIPPPPPPPPPPPPPPRRRRRRRRRRRGGGGLLLLLLLLKKKKKKKKKMMMMMMMMSSSSSSAAAAATTTTTTTFFFFFFFFFFFIIIIIIIIGGGGNNNNNNNNSSSSSSTTTTTTTAAAAAIIIIIIIIQQQQQQQQQEEEEEEEEELLLLLLLLFFFFFFFFFFFKKKKKKKKKRRRRRRRRRRRIIIIIIIISSSSSSEEEEEEEEEQQQQQQQQQFFFFFFFFFFFTTTTTTTAAAAAMMMMMMMMFFFFFFFFFFFRRRRRRRRRRRRRRRRRRRRRRKKKKKKKKKAAAAAFFFFFFFFFFFLLLLLLLLHHHHHHHHHHWWWWWWWWWWWWWWYYYYYYYYYYYYTTTTTTTGGGGEEEEEEEEEGGGGMMMMMMMMDDDDDDDDEEEEEEEEEMMMMMMMMEEEEEEEEEFFFFFFFFFFFTTTTTTTEEEEEEEEEAAAAAEEEEEEEEESSSSSSNNNNNNNNMMMMMMMMNNNNNNNNDDDDDDDDLLLLLLLLVVVVVVVSSSSSSEEEEEEEEEYYYYYYYYYYYYQQQQQQQQQQQQQQQQQQYYYYYYYYYYYYQQQQQQQQQDDDDDDDDAAAAATTTTTTTAAAAAEEEEEEEEEDDDDDDDDEEEEEEEEEGGGGEEEEEEEEEFFFFFFFFFFFDDDDDDDDEEEEEEEEEEEEEEEEEEEEEEEEEEEAAAAAEEEEEEEEEGGGGEEEEEEEEEGGGGQQQQQQQQQEEEEEEEEEYYYYYYYYYYYYAAAAAA

SEQ ID NO: 227 - protein, 1422 aa, Lytechinus pictus
FFFFFFFFFFFAAAAAPPPPPPPLLLLLLLLTTTTTTTSSSSSSRRRRRRRRRRRGGGGSSSSSSQQQQQQQQQQQQQQQQQQYYYYYYYYYYYYRRRRRRRRRRRAAAAALLLLLLLLTTTTTTTVVVVVVVSSSSSSEEEEEEEEELLLLLLLLTTTTTTTQQQQQQQQQQQQQQQQQQMMMMMMMMFFFFFFFFFFFDDDDDDDDAAAAAKKKKKKKKKNNNNNNNNMMMMMMMMMMMMMMMMAAAAAAAAAACCCCCCDDDDDDDDPPPPPPPRRRRRRRRRRRHHHHHHHHHHGGGGRRRRRRRRRRRYYYYYYYYYYYYLLLLLLLLTTTTTTTVVVVVVVAAAAAAAAAAIIIIIIIIFFFFFFFFFFFRRRRRRRRRRRGGGGRRRRRRRRRRRMMMMMMMMSSSSSSMMMMMMMMKKKKKKKKKEEEEEEEEEVVVVVVVDDDDDDDDEEEEEEEEEQQQQQQQQQMMMMMMMMLLLLLLLLNNNNNNNNVVVVVVVQQQQQQQQQNNNNNNNNKKKKKKKKKNNNNNNNNSSSSSSSSSSSSYYYYYYYYYYYYFFFFFFFFFFFVVVVVVVEEEEEEEEEWWWWWWWWWWWWWWIIIIIIIIPPPPPPPNNNNNNNNNNNNNNNNVVVVVVVKKKKKKKKKTTTTTTTAAAAAVVVVVVVCCCCCCDDDDDDDDIIIIIIIIPPPPPPPPPPPPPPRRRRRRRRRRRGGGGLLLLLLLLKKKKKKKKKMMMMMMMMSSSSSSAAAAATTTTTTTFFFFFFFFFFFIIIIIIIIGGGGNNNNNNNNSSSSSSTTTTTTTAAAAAIIIIIIIIQQQQQQQQQEEEEEEEEELLLLLLLLFFFFFFFFFFFKKKKKKKKKRRRRRRRRRRRIIIIIIIISSSSSSEEEEEEEEEQQQQQQQQQFFFFFFFFFFFTTTTTTTAAAAAMMMMMMMMFFFFFFFFFFFRRRRRRRRRRRRRRRRRRRRRRKKKKKKKKKAAAAAFFFFFFFFFFFLLLLLLLLHHHHHHHHHHWWWWWWWWWWWWWWYYYYYYYYYYYYTTTTTTTGGGGEEEEEEEEEGGGGMMMMMMMMDDDDDDDDEEEEEEEEEMMMMMMMMEEEEEEEEEFFFFFFFFFFFTTTTTTTEEEEEEEEEAAAAAEEEEEEEEESSSSSSNNNNNNNNMMMMMMMMNNNNNNNNDDDDDDDDLLLLLLLLVVVVVVVSSSSSSEEEEEEEEEYYYYYYYYYYYYQQQQQQQQQQQQQQQQQQYYYYYYYYYYYYQQQQQQQQQDDDDDDDDAAAAATTTTTTTAAAAAEEEEEEEEEEEEEEEEEEEEEEEEEEEGGGGEEEEEEEEEFFFFFFFFFFFDDDDDDDDEEEEEEEEEEEEEEEEEEEEEEEEEEEGGGGDDDDDDDDEEEEEEEEEEEEEEEEEEAAAAAAAAAAA

SEQ ID NO: 228 - protein, 3491 aa, Mycosphaerella pini
MMMMMMMMRRRRRRRRRRREEEEEEEEEIIIIIIIIVVVVVVVHHHHHHHHHHLLLLLLLLQQQQQQQQQTTTTTTTGGGGQQQQQQQQQCCCCCCGGGGNNNNNNNNQQQQQQQQQIIIIIIIIGGGGAAAAAAAAAAFFFFFFFFFFFWWWWWWWWWWWWWWQQQQQQQQQTTTTTTTIIIIIIIISSSSSSGGGGEEEEEEEEEHHHHHHHHHHGGGGLLLLLLLLDDDDDDDDGGGGSSSSSSGGGGVVVVVVVYYYYYYYYYYYYNNNNNNNNGGGGTTTTTTTSSSSSSDDDDDDDDLLLLLLLLQQQQQQQQQLLLLLLLLEEEEEEEEERRRRRRRRRRRMMMMMMMMNNNNNNNNVVVVVVVYYYYYYYYYYYYFFFFFFFFFFFNNNNNNNNEEEEEEEEEAAAAASSSSSSGGGGNNNNNNNNKKKKKKKKKYYYYYYYYYYYYVVVVVVVPPPPPPPRRRRRRRRRRRAAAAAVVVVVVVLLLLLLLLVVVVVVVDDDDDDDDLLLLLLLLEEEEEEEEEPPPPPPPGGGGTTTTTTTMMMMMMMMDDDDDDDDAAAAAVVVVVVVRRRRRRRRRRRAAAAAGGGGPPPPPPPFFFFFFFFFFFGGGGQQQQQQQQQLLLLLLLLFFFFFFFFFFFRRRRRRRRRRRPPPPPPPDDDDDDDDNNNNNNNNFFFFFFFFFFFVVVVVVVFFFFFFFFFFFGGGGQQQQQQQQQSSSSSSGGGGAAAAAGGGGNNNNNNNNNNNNNNNNWWWWWWWWWWWWWWAAAAAKKKKKKKKKGGGGHHHHHHHHHHYYYYYYYYYYYYTTTTTTTEEEEEEEEEGGGGAAAAAEEEEEEEEELLLLLLLLVVVVVVVDDDDDDDDQQQQQQQQQVVVVVVVLLLLLLLLDDDDDDDDVVVVVVVVVVVVVVRRRRRRRRRRRRRRRRRRRRRREEEEEEEEEAAAAAEEEEEEEEEGGGGCCCCCCDDDDDDDDCCCCCCLLLLLLLLQQQQQQQQQGGGGFFFFFFFFFFFQQQQQQQQQIIIIIIIITTTTTTTHHHHHHHHHHSSSSSSLLLLLLLLGGGGGGGGGGGGTTTTTTTGGGGAAAAAGGGGMMMMMMMMGGGGTTTTTTTLLLLLLLLLLLLLLLLIIIIIIIISSSSSSKKKKKKKKKIIIIIIIIRRRRRRRRRRREEEEEEEEEEEEEEEEEEFFFFFFFFFFFPPPPPPPDDDDDDDDRRRRRRRRRRRMMMMMMMMMMMMMMMMAAAAATTTTTTTFFFFFFFFFFFSSSSSSVVVVVVVMMMMMMMMPPPPPPPSSSSSSPPPPPPPKKKKKKKKKVVVVVVVSSSSSSDDDDDDDDTTTTTTTVVVVVVVVVVVVVVEEEEEEEEEPPPPPPPYYYYYYYYYYYYNNNNNNNNAAAAATTTTTTTLLLLLLLLSSSSSSVVVVVVVHHHHHHHHHHQQQQQQQQQLLLLLLLLVVVVVVVEEEEEEEEENNNNNNNNSSSSSSDDDDDDDDEEEEEEEEETTTTTTTFFFFFFFFFFFCCCCCCIIIIIIIIDDDDDDDDNNNNNNNNEEEEEEEEEAAAAALLLLLLLLYYYYYYYYYYYYDDDDDDDDIIIIIIIICCCCCCMMMMMMMMRRRRRRRRRRRTTTTTTTLLLLLLLLKKKKKKKKKLLLLLLLLNNNNNNNNNNNNNNNNPPPPPPPSSSSSSYYYYYYYYYYYYGGGGDDDDDDDDLLLLLLLLNNNNNNNNHHHHHHHHHHLLLLLLLLVVVVVVVSSSSSSAAAAAVVVVVVVMMMMMMMMSSSSSSGGGGVVVVVVVTTTTTTTTTTTTTTCCCCCCLLLLLLLLRRRRRRRRRRRFFFFFFFFFFFPPPPPPPGGGGQQQQQQQQQLLLLLLLLNNNNNNNNSSSSSSDDDDDDDDLLLLLLLLRRRRRRRRRRRKKKKKKKKKLLLLLLLLAAAAAVVVVVVVNNNNNNNNMMMMMMMMVVVVVVVPPPPPPPFFFFFFFFFFFPPPPPPPRRRRRRRRRRRLLLLLLLLHHHHHHHHHHFFFFFFFFFFFFFFFFFFFFFFMMMMMMMMVVVVVVVGGGGFFFFFFFFFFFAAAAAPPPPPPPLLLLLLLLTTTTTTTSSSSSSRRRRRRRRRRRGGGGAAAAAHHHHHHHHHHSSSSSSFFFFFFFFFFFRRRRRRRRRRRAAAAAVVVVVVVTTTTTTTVVVVVVVPPPPPPPEEEEEEEEELLLLLLLLTTTTTTTQQQQQQQQQQQQQQQQQQIIIIIIIIFFFFFFFFFFFDDDDDDDDPPPPPPPKKKKKKKKKNNNNNNNNMMMMMMMMMMMMMMMMAAAAAAAAAASSSSSSDDDDDDDDFFFFFFFFFFFRRRRRRRRRRRNNNNNNNNGGGGRRRRRRRRRRRYYYYYYYYYYYYLLLLLLLLTTTTTTTCCCCCCSSSSSSAAAAAIIIIIIIIYYYYYYYYYYYYRRRRRRRRRRRGGGGKKKKKKKKKVVVVVVVSSSSSSMMMMMMMMKKKKKKKKKEEEEEEEEEVVVVVVVEEEEEEEEEDDDDDDDDQQQQQQQQQIIIIIIIIRRRRRRRRRRRNNNNNNNNVVVVVVVQQQQQQQQQNNNNNNNNKKKKKKKKKNNNNNNNNTTTTTTTAAAAAYYYYYYYYYYYYFFFFFFFFFFFVVVVVVVEEEEEEEEEWWWWWWWWWWWWWWIIIIIIIIPPPPPPPNNNNNNNNNNNNNNNNVVVVVVVQQQQQQQQQTTTTTTTAAAAALLLLLLLLCCCCCCSSSSSSIIIIIIIIPPPPPPPPPPPPPPRRRRRRRRRRRGGGGLLLLLLLLKKKKKKKKKMMMMMMMMSSSSSSSSSSSSTTTTTTTFFFFFFFFFFFVVVVVVVGGGGNNNNNNNNSSSSSSTTTTTTTSSSSSSIIIIIIIIQQQQQQQQQEEEEEEEEELLLLLLLLFFFFFFFFFFFKKKKKKKKKRRRRRRRRRRRVVVVVVVGGGGDDDDDDDDQQQQQQQQQFFFFFFFFFFFTTTTTTTAAAAAMMMMMMMMFFFFFFFFFFFRRRRRRRRRRRRRRRRRRRRRRKKKKKKKKKAAAAAFFFFFFFFFFFLLLLLLLLHHHHHHHHHHWWWWWWWWWWWWWWYYYYYYYYYYYYTTTTTTTGGGGEEEEEEEEEGGGGMMMMMMMMDDDDDDDDEEEEEEEEEMMMMMMMMEEEEEEEEEFFFFFFFFFFFTTTTTTTEEEEEEEEEAAAAAEEEEEEEEESSSSSSNNNNNNNNMMMMMMMMNNNNNNNNDDDDDDDDLLLLLLLLVVVVVVVSSSSSSEEEEEEEEEYYYYYYYYYYYYQQQQQQQQQQQQQQQQQQYYYYYYYYYYYYQQQQQQQQQEEEEEEEEEAAAAASSSSSSVVVVVVVSSSSSSEEEEEEEEEGGGGEEEEEEEEEEEEEEEEEEEEEEEEEEEYYYYYYYYYYYYDDDDDDDDEEEEEEEEEEEEEEEEEEAAAAAPPPPPPPLLLLLLLLEEEEEEEEEGGGGEEEEEEEEEEEEEEEEEEE

SEQ ID NO: 229 - protein, 3541 aa, Naegleria gruberi
MMMMMMMMRRRRRRRRRRREEEEEEEEEIIIIIIIIVVVVVVVHHHHHHHHHHIIIIIIIIQQQQQQQQQAAAAAGGGGQQQQQQQQQCCCCCCGGGGNNNNNNNNQQQQQQQQQIIIIIIIIGGGGAAAAAKKKKKKKKKFFFFFFFFFFFWWWWWWWWWWWWWWEEEEEEEEEVVVVVVVIIIIIIIISSSSSSDDDDDDDDEEEEEEEEEHHHHHHHHHHGGGGVVVVVVVDDDDDDDDPPPPPPPTTTTTTTGGGGAAAAAYYYYYYYYYYYYHHHHHHHHHHGGGGDDDDDDDDSSSSSSDDDDDDDDLLLLLLLLQQQQQQQQQLLLLLLLLEEEEEEEEERRRRRRRRRRRIIIIIIIINNNNNNNNVVVVVVVYYYYYYYYYYYYYYYYYYYYYYYYNNNNNNNNEEEEEEEEEAAAAATTTTTTTGGGGGGGGRRRRRRRRRRRYYYYYYYYYYYYVVVVVVVPPPPPPPRRRRRRRRRRRAAAAAIIIIIIIILLLLLLLLMMMMMMMMDDDDDDDDLLLLLLLLEEEEEEEEEPPPPPPPGGGGTTTTTTTMMMMMMMMDDDDDDDDSSSSSSVVVVVVVRRRRRRRRRRRAAAAAGGGGPPPPPPPYYYYYYYYYYYYGGGGQQQQQQQQQIIIIIIIIFFFFFFFFFFFRRRRRRRRRRRPPPPPPPDDDDDDDDNNNNNNNNFFFFFFFFFFFVVVVVVVFFFFFFFFFFFGGGGQQQQQQQQQTTTTTTTGGGGAAAAAGGGGNNNNNNNNNNNNNNNNWWWWWWWWWWWWWWAAAAAKKKKKKKKKGGGGHHHHHHHHHHYYYYYYYYYYYYTTTTTTTEEEEEEEEEGGGGAAAAAEEEEEEEEELLLLLLLLIIIIIIIIDDDDDDDDSSSSSSVVVVVVVLLLLLLLLDDDDDDDDVVVVVVVVVVVVVVRRRRRRRRRRRKKKKKKKKKEEEEEEEEEAAAAAEEEEEEEEESSSSSSCCCCCCDDDDDDDDCCCCCCLLLLLLLLQQQQQQQQQGGGGFFFFFFFFFFFQQQQQQQQQIIIIIIIIAAAAAHHHHHHHHHHSSSSSSLLLLLLLLGGGGGGGGGGGGTTTTTTTGGGGSSSSSSGGGGMMMMMMMMGGGGTTTTTTTLLLLLLLLLLLLLLLLIIIIIIIISSSSSSKKKKKKKKKIIIIIIIIRRRRRRRRRRREEEEEEEEEEEEEEEEEEYYYYYYYYYYYYPPPPPPPDDDDDDDDRRRRRRRRRRRMMMMMMMMMMMMMMMMMMMMMMMMTTTTTTTFFFFFFFFFFFSSSSSSVVVVVVVFFFFFFFFFFFPPPPPPPSSSSSSPPPPPPPKKKKKKKKKVVVVVVVSSSSSSDDDDDDDDTTTTTTTVVVVVVVVVVVVVVEEEEEEEEEPPPPPPPYYYYYYYYYYYYNNNNNNNNAAAAATTTTTTTLLLLLLLLSSSSSSVVVVVVVHHHHHHHHHHQQQQQQQQQLLLLLLLLVVVVVVVEEEEEEEEENNNNNNNNAAAAADDDDDDDDEEEEEEEEEVVVVVVVMMMMMMMMCCCCCCIIIIIIIIDDDDDDDDNNNNNNNNEEEEEEEEEAAAAALLLLLLLLYYYYYYYYYYYYDDDDDDDDIIIIIIIICCCCCCFFFFFFFFFFFRRRRRRRRRRRTTTTTTTLLLLLLLLKKKKKKKKKLLLLLLLLTTTTTTTTTTTTTTPPPPPPPTTTTTTTFFFFFFFFFFFGGGGDDDDDDDDLLLLLLLLNNNNNNNNHHHHHHHHHHLLLLLLLLVVVVVVVSSSSSSIIIIIIIIVVVVVVVMMMMMMMMSSSSSSGGGGVVVVVVVTTTTTTTCCCCCCCCCCCCLLLLLLLLRRRRRRRRRRRFFFFFFFFFFFPPPPPPPGGGGQQQQQQQQQLLLLLLLLNNNNNNNNSSSSSSDDDDDDDDLLLLLLLLRRRRRRRRRRRKKKKKKKKKLLLLLLLLAAAAAVVVVVVVNNNNNNNNLLLLLLLLIIIIIIIIPPPPPPPFFFFFFFFFFFPPPPPPPRRRRRRRRRRRLLLLLLLLHHHHHHHHHHFFFFFFFFFFFFFFFFFFFFFFLLLLLLLLIIIIIIIIGGGGFFFFFFFFFFFAAAAAPPPPPPPLLLLLLLLTTTTTTTSSSSSSRRRRRRRRRRRGGGGSSSSSSQQQQQQQQQQQQQQQQQQYYYYYYYYYYYYRRRRRRRRRRRAAAAALLLLLLLLTTTTTTTVVVVVVVPPPPPPPEEEEEEEEELLLLLLLLTTTTTTTQQQQQQQQQQQQQQQQQQMMMMMMMMFFFFFFFFFFFDDDDDDDDAAAAAKKKKKKKKKNNNNNNNNMMMMMMMMMMMMMMMMAAAAAAAAAASSSSSSDDDDDDDDPPPPPPPRRRRRRRRRRRHHHHHHHHHHGGGGRRRRRRRRRRRYYYYYYYYYYYYLLLLLLLLTTTTTTTAAAAASSSSSSAAAAAMMMMMMMMFFFFFFFFFFFRRRRRRRRRRRGGGGRRRRRRRRRRRMMMMMMMMSSSSSSTTTTTTTKKKKKKKKKEEEEEEEEEVVVVVVVDDDDDDDDEEEEEEEEEQQQQQQQQQMMMMMMMMLLLLLLLLNNNNNNNNVVVVVVVQQQQQQQQQNNNNNNNNKKKKKKKKKNNNNNNNNSSSSSSSSSSSSYYYYYYYYYYYYFFFFFFFFFFFVVVVVVVEEEEEEEEEWWWWWWWWWWWWWWIIIIIIIIPPPPPPPNNNNNNNNNNNNNNNNIIIIIIIIKKKKKKKKKSSSSSSSSSSSSVVVVVVVCCCCCCDDDDDDDDIIIIIIIIPPPPPPPPPPPPPPRRRRRRRRRRRGGGGLLLLLLLLKKKKKKKKKMMMMMMMMAAAAAAAAAATTTTTTTFFFFFFFFFFFIIIIIIIIGGGGNNNNNNNNSSSSSSTTTTTTTAAAAAIIIIIIIIQQQQQQQQQEEEEEEEEEMMMMMMMMFFFFFFFFFFFKKKKKKKKKRRRRRRRRRRRVVVVVVVSSSSSSEEEEEEEEEQQQQQQQQQFFFFFFFFFFFTTTTTTTAAAAAMMMMMMMMFFFFFFFFFFFRRRRRRRRRRRRRRRRRRRRRRKKKKKKKKKAAAAAFFFFFFFFFFFLLLLLLLLHHHHHHHHHHWWWWWWWWWWWWWWYYYYYYYYYYYYTTTTTTTGGGGEEEEEEEEEGGGGMMMMMMMMDDDDDDDDEEEEEEEEEMMMMMMMMEEEEEEEEEFFFFFFFFFFFTTTTTTTEEEEEEEEEAAAAAEEEEEEEEESSSSSSNNNNNNNNMMMMMMMMNNNNNNNNDDDDDDDDLLLLLLLLVVVVVVVSSSSSSEEEEEEEEEYYYYYYYYYYYYQQQQQQQQQQQQQQQQQQYYYYYYYYYYYYQQQQQQQQQDDDDDDDDAAAAATTTTTTTAAAAAEEEEEEEEEEEEEEEEEEEEEEEEEEEGGGGEEEEEEEEEFFFFFFFFFFFDDDDDDDDEEEEEEEEENNNNNNNNEEEEEEEEEGGGGAAAAAEEEEEEEEEGGGGEEEEEEEEEEEEEEEEEEQQQQQQQQQPPPPPPPAAAAADDDDDDDDYYYYYYYYYYYYY

SEQ ID NO: 230 - protein, 3496 aa, Neurospora crassa
MMMMMMMMRRRRRRRRRRREEEEEEEEEIIIIIIIIVVVVVVVHHHHHHHHHHLLLLLLLLQQQQQQQQQTTTTTTTGGGGQQQQQQQQQCCCCCCGGGGNNNNNNNNQQQQQQQQQIIIIIIIIGGGGAAAAAAAAAAFFFFFFFFFFFWWWWWWWWWWWWWWQQQQQQQQQTTTTTTTIIIIIIIISSSSSSGGGGEEEEEEEEEHHHHHHHHHHGGGGLLLLLLLLDDDDDDDDAAAAASSSSSSGGGGVVVVVVVYYYYYYYYYYYYNNNNNNNNGGGGTTTTTTTSSSSSSEEEEEEEEELLLLLLLLQQQQQQQQQLLLLLLLLEEEEEEEEERRRRRRRRRRRMMMMMMMMNNNNNNNNVVVVVVVYYYYYYYYYYYYFFFFFFFFFFFNNNNNNNNEEEEEEEEEAAAAASSSSSSGGGGNNNNNNNNKKKKKKKKKYYYYYYYYYYYYVVVVVVVPPPPPPPRRRRRRRRRRRAAAAAVVVVVVVLLLLLLLLVVVVVVVDDDDDDDDLLLLLLLLEEEEEEEEEPPPPPPPGGGGTTTTTTTMMMMMMMMDDDDDDDDAAAAAVVVVVVVRRRRRRRRRRRAAAAAGGGGPPPPPPPFFFFFFFFFFFGGGGQQQQQQQQQLLLLLLLLFFFFFFFFFFFRRRRRRRRRRRPPPPPPPDDDDDDDDNNNNNNNNFFFFFFFFFFFVVVVVVVFFFFFFFFFFFGGGGQQQQQQQQQSSSSSSGGGGAAAAAGGGGNNNNNNNNNNNNNNNNWWWWWWWWWWWWWWAAAAAKKKKKKKKKGGGGHHHHHHHHHHYYYYYYYYYYYYTTTTTTTEEEEEEEEEGGGGAAAAAEEEEEEEEELLLLLLLLVVVVVVVDDDDDDDDQQQQQQQQQVVVVVVVLLLLLLLLDDDDDDDDVVVVVVVVVVVVVVRRRRRRRRRRRRRRRRRRRRRREEEEEEEEEAAAAAEEEEEEEEEGGGGCCCCCCDDDDDDDDCCCCCCLLLLLLLLQQQQQQQQQGGGGFFFFFFFFFFFQQQQQQQQQIIIIIIIITTTTTTTHHHHHHHHHHSSSSSSLLLLLLLLGGGGGGGGGGGGTTTTTTTGGGGAAAAAGGGGMMMMMMMMGGGGTTTTTTTLLLLLLLLLLLLLLLLIIIIIIIISSSSSSKKKKKKKKKIIIIIIIIRRRRRRRRRRREEEEEEEEEEEEEEEEEEFFFFFFFFFFFPPPPPPPDDDDDDDDRRRRRRRRRRRMMMMMMMMMMMMMMMMAAAAATTTTTTTFFFFFFFFFFFSSSSSSVVVVVVVVVVVVVVPPPPPPPSSSSSSPPPPPPPKKKKKKKKKVVVVVVVSSSSSSDDDDDDDDTTTTTTTVVVVVVVVVVVVVVEEEEEEEEEPPPPPPPYYYYYYYYYYYYNNNNNNNNAAAAATTTTTTTLLLLLLLLSSSSSSVVVVVVVHHHHHHHHHHQQQQQQQQQLLLLLLLLVVVVVVVEEEEEEEEENNNNNNNNSSSSSSDDDDDDDDEEEEEEEEETTTTTTTFFFFFFFFFFFCCCCCCIIIIIIIIDDDDDDDDNNNNNNNNEEEEEEEEEAAAAALLLLLLLLYYYYYYYYYYYYDDDDDDDDIIIIIIIICCCCCCMMMMMMMMRRRRRRRRRRRTTTTTTTLLLLLLLLKKKKKKKKKLLLLLLLLSSSSSSNNNNNNNNPPPPPPPSSSSSSYYYYYYYYYYYYGGGGDDDDDDDDLLLLLLLLNNNNNNNNHHHHHHHHHHLLLLLLLLVVVVVVVSSSSSSAAAAAVVVVVVVMMMMMMMMSSSSSSGGGGVVVVVVVTTTTTTTVVVVVVVSSSSSSLLLLLLLLRRRRRRRRRRRFFFFFFFFFFFPPPPPPPGGGGQQQQQQQQQLLLLLLLLNNNNNNNNSSSSSSDDDDDDDDLLLLLLLLRRRRRRRRRRRKKKKKKKKKLLLLLLLLAAAAAVVVVVVVNNNNNNNNMMMMMMMMVVVVVVVPPPPPPPFFFFFFFFFFFPPPPPPPRRRRRRRRRRRLLLLLLLLHHHHHHHHHHFFFFFFFFFFFFFFFFFFFFFFMMMMMMMMVVVVVVVGGGGFFFFFFFFFFFAAAAAPPPPPPPLLLLLLLLTTTTTTTSSSSSSRRRRRRRRRRRGGGGAAAAAHHHHHHHHHHHHHHHHHHHHFFFFFFFFFFFRRRRRRRRRRRAAAAAVVVVVVVSSSSSSVVVVVVVPPPPPPPEEEEEEEEELLLLLLLLTTTTTTTQQQQQQQQQQQQQQQQQQMMMMMMMMFFFFFFFFFFFDDDDDDDDPPPPPPPKKKKKKKKKNNNNNNNNMMMMMMMMMMMMMMMMAAAAAAAAAASSSSSSDDDDDDDDFFFFFFFFFFFRRRRRRRRRRRNNNNNNNNGGGGRRRRRRRRRRRYYYYYYYYYYYYLLLLLLLLTTTTTTTCCCCCCSSSSSSAAAAAIIIIIIIIFFFFFFFFFFFRRRRRRRRRRRGGGGKKKKKKKKKVVVVVVVSSSSSSMMMMMMMMKKKKKKKKKEEEEEEEEEVVVVVVVEEEEEEEEEDDDDDDDDQQQQQQQQQMMMMMMMMRRRRRRRRRRRNNNNNNNNVVVVVVVQQQQQQQQQNNNNNNNNKKKKKKKKKNNNNNNNNSSSSSSSSSSSSYYYYYYYYYYYYFFFFFFFFFFFVVVVVVVEEEEEEEEEWWWWWWWWWWWWWWIIIIIIIIPPPPPPPNNNNNNNNNNNNNNNNVVVVVVVQQQQQQQQQTTTTTTTAAAAALLLLLLLLCCCCCCSSSSSSIIIIIIIIPPPPPPPPPPPPPPRRRRRRRRRRRGGGGLLLLLLLLKKKKKKKKKMMMMMMMMSSSSSSSSSSSSTTTTTTTFFFFFFFFFFFVVVVVVVGGGGNNNNNNNNSSSSSSTTTTTTTAAAAAIIIIIIIIQQQQQQQQQEEEEEEEEELLLLLLLLFFFFFFFFFFFKKKKKKKKKRRRRRRRRRRRIIIIIIIIGGGGEEEEEEEEEQQQQQQQQQFFFFFFFFFFFTTTTTTTAAAAAMMMMMMMMFFFFFFFFFFFKKKKKKKKKRRRRRRRRRRRKKKKKKKKKAAAAAFFFFFFFFFFFLLLLLLLLHHHHHHHHHHWWWWWWWWWWWWWWYYYYYYYYYYYYTTTTTTTGGGGEEEEEEEEEGGGGMMMMMMMMDDDDDDDDEEEEEEEEEMMMMMMMMEEEEEEEEEFFFFFFFFFFFTTTTTTTEEEEEEEEEAAAAAEEEEEEEEESSSSSSNNNNNNNNMMMMMMMMNNNNNNNNDDDDDDDDLLLLLLLLVVVVVVVSSSSSSEEEEEEEEEYYYYYYYYYYYYQQQQQQQQQQQQQQQQQQYYYYYYYYYYYYQQQQQQQQQDDDDDDDDAAAAAGGGGVVVVVVVDDDDDDDDEEEEEEEEEEEEEEEEEEEEEEEEEEEEEEEEEEEEEEEEEEEEEYYYYYYYYYYYYEEEEEEEEEEEEEEEEEEEEEEEEEEEAAAAAPPPPPPPLLLLLLLLEEEEEEEEEGGGGEEEEEEEEEEEEEEEEEEE

SEQ ID NO: 231 - protein, 3537 aa, Octopus dofleini
MMMMMMMMRRRRRRRRRRREEEEEEEEEIIIIIIIIVVVVVVVHHHHHHHHHHIIIIIIIIQQQQQQQQQAAAAAGGGGQQQQQQQQQCCCCCCGGGGNNNNNNNNQQQQQQQQQIIIIIIIIGGGGSSSSSSKKKKKKKKKFFFFFFFFFFFWWWWWWWWWWWWWWEEEEEEEEEVVVVVVVIIIIIIIISSSSSSEEEEEEEEEEEEEEEEEEHHHHHHHHHHGGGGIIIIIIIIDDDDDDDDPPPPPPPSSSSSSGGGGVVVVVVVYYYYYYYYYYYYQQQQQQQQQGGGGKKKKKKKKKLLLLLLLLSSSSSSTTTTTTTQQQQQQQQQLLLLLLLLEEEEEEEEERRRRRRRRRRRSSSSSSYYYYYYYYYYYYVVVVVVVYYYYYYYYYYYYFFFFFFFFFFFNNNNNNNNEEEEEEEEEAAAAASSSSSSSSSSSSGGGGKKKKKKKKKYYYYYYYYYYYYVVVVVVVPPPPPPPRRRRRRRRRRRAAAAAVVVVVVVLLLLLLLLLLLLLLLLDDDDDDDDLLLLLLLLEEEEEEEEEPPPPPPPGGGGTTTTTTTMMMMMMMMDDDDDDDDSSSSSSVVVVVVVRRRRRRRRRRRSSSSSSGGGGPPPPPPPYYYYYYYYYYYYGGGGSSSSSSLLLLLLLLFFFFFFFFFFFRRRRRRRRRRRPPPPPPPDDDDDDDDNNNNNNNNYYYYYYYYYYYYVVVVVVVFFFFFFFFFFFGGGGQQQQQQQQQSSSSSSGGGGAAAAAGGGGNNNNNNNNNNNNNNNNWWWWWWWWWWWWWWAAAAAKKKKKKKKKGGGGHHHHHHHHHHYYYYYYYYYYYYTTTTTTTEEEEEEEEEGGGGAAAAAEEEEEEEEELLLLLLLLVVVVVVVDDDDDDDDTTTTTTTVVVVVVVLLLLLLLLDDDDDDDDVVVVVVVIIIIIIIIRRRRRRRRRRRKKKKKKKKKEEEEEEEEECCCCCCEEEEEEEEEGGGGCCCCCCEEEEEEEEECCCCCCIIIIIIIIQQQQQQQQQGGGGFFFFFFFFFFFQQQQQQQQQMMMMMMMMTTTTTTTHHHHHHHHHHSSSSSSLLLLLLLLGGGGGGGGGGGGTTTTTTTGGGGAAAAAGGGGMMMMMMMMGGGGTTTTTTTLLLLLLLLLLLLLLLLIIIIIIIISSSSSSKKKKKKKKKYYYYYYYYYYYYRRRRRRRRRRREEEEEEEEEEEEEEEEEEYYYYYYYYYYYYPPPPPPPDDDDDDDDRRRRRRRRRRRIIIIIIIIMMMMMMMMTTTTTTTTTTTTTTFFFFFFFFFFFSSSSSSVVVVVVVMMMMMMMMPPPPPPPSSSSSSPPPPPPPKKKKKKKKKVVVVVVVSSSSSSDDDDDDDDTTTTTTTVVVVVVVVVVVVVVEEEEEEEEEPPPPPPPYYYYYYYYYYYYNNNNNNNNAAAAATTTTTTTLLLLLLLLSSSSSSIIIIIIIIHHHHHHHHHHQQQQQQQQQLLLLLLLLVVVVVVVEEEEEEEEENNNNNNNNTTTTTTTDDDDDDDDEEEEEEEEETTTTTTTFFFFFFFFFFFCCCCCCIIIIIIIIDDDDDDDDNNNNNNNNEEEEEEEEEAAAAALLLLLLLLYYYYYYYYYYYYDDDDDDDDIIIIIIIISSSSSSLLLLLLLLRRRRRRRRRRRTTTTTTTLLLLLLLLKKKKKKKKKLLLLLLLLPPPPPPPNNNNNNNNPPPPPPPTTTTTTTYYYYYYYYYYYYGGGGDDDDDDDDLLLLLLLLNNNNNNNNHHHHHHHHHHLLLLLLLLVVVVVVVSSSSSSAAAAATTTTTTTMMMMMMMMSSSSSSGGGGVVVVVVVTTTTTTTTTTTTTTCCCCCCLLLLLLLLRRRRRRRRRRRFFFFFFFFFFFPPPPPPPGGGGQQQQQQQQQLLLLLLLLNNNNNNNNAAAAADDDDDDDDLLLLLLLLRRRRRRRRRRRKKKKKKKKKLLLLLLLLAAAAAVVVVVVVNNNNNNNNMMMMMMMMVVVVVVVPPPPPPPFFFFFFFFFFFPPPPPPPRRRRRRRRRRRLLLLLLLLHHHHHHHHHHFFFFFFFFFFFFFFFFFFFFFFMMMMMMMMPPPPPPPGGGGFFFFFFFFFFFAAAAAPPPPPPPLLLLLLLLTTTTTTTSSSSSSRRRRRRRRRRRGGGGSSSSSSQQQQQQQQQDDDDDDDDYYYYYYYYYYYYRRRRRRRRRRRMMMMMMMMHHHHHHHHHHSSSSSSVVVVVVVSSSSSSDDDDDDDDLLLLLLLLTTTTTTTQQQQQQQQQQQQQQQQQQLLLLLLLLFFFFFFFFFFFDDDDDDDDAAAAAKKKKKKKKKNNNNNNNNMMMMMMMMMMMMMMMMTTTTTTTAAAAACCCCCCDDDDDDDDPPPPPPPRRRRRRRRRRRHHHHHHHHHHGGGGRRRRRRRRRRRYYYYYYYYYYYYLLLLLLLLTTTTTTTVVVVVVVAAAAAAAAAAVVVVVVVFFFFFFFFFFFRRRRRRRRRRRGGGGKKKKKKKKKMMMMMMMMSSSSSSMMMMMMMMKKKKKKKKKEEEEEEEEEVVVVVVVDDDDDDDDEEEEEEEEEQQQQQQQQQMMMMMMMMFFFFFFFFFFFSSSSSSIIIIIIIIQQQQQQQQQNNNNNNNNKKKKKKKKKMMMMMMMMSSSSSSPPPPPPPYYYYYYYYYYYYFFFFFFFFFFFVVVVVVVEEEEEEEEEWWWWWWWWWWWWWWIIIIIIIIPPPPPPPNNNNNNNNNNNNNNNNVVVVVVVKKKKKKKKKTTTTTTTAAAAAVVVVVVVCCCCCCDDDDDDDDIIIIIIIIPPPPPPPPPPPPPPTTTTTTTGGGGLLLLLLLLEEEEEEEEEMMMMMMMMSSSSSSAAAAATTTTTTTFFFFFFFFFFFIIIIIIIIGGGGNNNNNNNNSSSSSSTTTTTTTAAAAAIIIIIIIIQQQQQQQQQEEEEEEEEEIIIIIIIIFFFFFFFFFFFKKKKKKKKKRRRRRRRRRRRIIIIIIIISSSSSSEEEEEEEEEQQQQQQQQQFFFFFFFFFFFTTTTTTTAAAAAMMMMMMMMFFFFFFFFFFFRRRRRRRRRRRRRRRRRRRRRRKKKKKKKKKAAAAAFFFFFFFFFFFLLLLLLLLHHHHHHHHHHWWWWWWWWWWWWWWYYYYYYYYYYYYTTTTTTTGGGGEEEEEEEEEGGGGMMMMMMMMDDDDDDDDEEEEEEEEEMMMMMMMMEEEEEEEEEFFFFFFFFFFFTTTTTTTEEEEEEEEEAAAAAEEEEEEEEESSSSSSNNNNNNNNMMMMMMMMNNNNNNNNDDDDDDDDLLLLLLLLVVVVVVVSSSSSSEEEEEEEEEYYYYYYYYYYYYQQQQQQQQQQQQQQQQQQYYYYYYYYYYYYQQQQQQQQQEEEEEEEEEAAAAARRRRRRRRRRRSSSSSSTTTTTTTDDDDDDDDSSSSSSDDDDDDDDEEEEEEEEEYYYYYYYYYYYYDDDDDDDDNNNNNNNNEEEEEEEEEEEEEEEEEEYYYYYYYYYYYYYYYYYYYYYYYYNNNNNNNNQQQQQQQQQQQQQQQQQQEEEEEEEEEEEEEEEEEEE

SEQ ID NO: 232 - protein, 3506 aa, Onchocerca gibsoni
MMMMMMMMRRRRRRRRRRREEEEEEEEEIIIIIIIIVVVVVVVHHHHHHHHHHIIIIIIIIQQQQQQQQQAAAAAGGGGQQQQQQQQQCCCCCCGGGGNNNNNNNNQQQQQQQQQIIIIIIIIGGGGSSSSSSKKKKKKKKKFFFFFFFFFFFWWWWWWWWWWWWWWEEEEEEEEEVVVVVVVIIIIIIIISSSSSSDDDDDDDDEEEEEEEEEHHHHHHHHHHGGGGIIIIIIIIDDDDDDDDPPPPPPPLLLLLLLLGGGGQQQQQQQQQYYYYYYYYYYYYHHHHHHHHHHGGGGDDDDDDDDSSSSSSDDDDDDDDLLLLLLLLQQQQQQQQQLLLLLLLLEEEEEEEEERRRRRRRRRRRIIIIIIIINNNNNNNNVVVVVVVYYYYYYYYYYYYYYYYYYYYYYYYNNNNNNNNEEEEEEEEEVVVVVVVQQQQQQQQQKKKKKKKKKKKKKKKKKKRRRRRRRRRRRYYYYYYYYYYYYVVVVVVVPPPPPPPRRRRRRRRRRRAAAAAIIIIIIIILLLLLLLLVVVVVVVDDDDDDDDLLLLLLLLEEEEEEEEEPPPPPPPGGGGTTTTTTTMMMMMMMMDDDDDDDDSSSSSSVVVVVVVRRRRRRRRRRRAAAAAGGGGAAAAAFFFFFFFFFFFGGGGQQQQQQQQQLLLLLLLLFFFFFFFFFFFRRRRRRRRRRRPPPPPPPDDDDDDDDNNNNNNNNYYYYYYYYYYYYVVVVVVVFFFFFFFFFFFGGGGQQQQQQQQQSSSSSSGGGGAAAAAGGGGNNNNNNNNNNNNNNNNWWWWWWWWWWWWWWAAAAAKKKKKKKKKGGGGHHHHHHHHHHYYYYYYYYYYYYTTTTTTTEEEEEEEEEGGGGAAAAAEEEEEEEEELLLLLLLLVVVVVVVDDDDDDDDSSSSSSVVVVVVVLLLLLLLLDDDDDDDDVVVVVVVIIIIIIIIRRRRRRRRRRRKKKKKKKKKEEEEEEEEEAAAAAEEEEEEEEEAAAAACCCCCCDDDDDDDDCCCCCCLLLLLLLLQQQQQQQQQGGGGFFFFFFFFFFFQQQQQQQQQFFFFFFFFFFFTTTTTTTHHHHHHHHHHSSSSSSLLLLLLLLGGGGGGGGGGGGTTTTTTTGGGGSSSSSSGGGGMMMMMMMMGGGGTTTTTTTLLLLLLLLLLLLLLLLIIIIIIIISSSSSSKKKKKKKKKIIIIIIIIRRRRRRRRRRREEEEEEEEEEEEEEEEEEYYYYYYYYYYYYPPPPPPPDDDDDDDDRRRRRRRRRRRIIIIIIIIMMMMMMMMTTTTTTTTTTTTTTFFFFFFFFFFFSSSSSSVVVVVVVVVVVVVVPPPPPPPSSSSSSPPPPPPPKKKKKKKKKVVVVVVVSSSSSSDDDDDDDDTTTTTTTVVVVVVVVVVVVVVEEEEEEEEEPPPPPPPYYYYYYYYYYYYNNNNNNNNAAAAATTTTTTTLLLLLLLLSSSSSSVVVVVVVHHHHHHHHHHQQQQQQQQQLLLLLLLLVVVVVVVEEEEEEEEENNNNNNNNTTTTTTTDDDDDDDDEEEEEEEEETTTTTTTFFFFFFFFFFFCCCCCCIIIIIIIIDDDDDDDDNNNNNNNNEEEEEEEEEAAAAALLLLLLLLYYYYYYYYYYYYDDDDDDDDIIIIIIIICCCCCCFFFFFFFFFFFRRRRRRRRRRRTTTTTTTLLLLLLLLKKKKKKKKKLLLLLLLLTTTTTTTTTTTTTTPPPPPPPTTTTTTTYYYYYYYYYYYYGGGGDDDDDDDDLLLLLLLLNNNNNNNNHHHHHHHHHHLLLLLLLLVVVVVVVSSSSSSAAAAATTTTTTTMMMMMMMMSSSSSSGGGGVVVVVVVTTTTTTTTTTTTTTCCCCCCLLLLLLLLRRRRRRRRRRRFFFFFFFFFFFPPPPPPPGGGGQQQQQQQQQLLLLLLLLNNNNNNNNAAAAADDDDDDDDLLLLLLLLRRRRRRRRRRRKKKKKKKKKLLLLLLLLAAAAAVVVVVVVNNNNNNNNMMMMMMMMVVVVVVVPPPPPPPFFFFFFFFFFFPPPPPPPRRRRRRRRRRRLLLLLLLLHHHHHHHHHHFFFFFFFFFFFFFFFFFFFFFFMMMMMMMMPPPPPPPGGGGFFFFFFFFFFFAAAAAPPPPPPPLLLLLLLLTTTTTTTSSSSSSRRRRRRRRRRRSSSSSSNNNNNNNNQQQQQQQQQQQQQQQQQQYYYYYYYYYYYYRRRRRRRRRRRAAAAAVVVVVVVTTTTTTTVVVVVVVAAAAAEEEEEEEEELLLLLLLLTTTTTTTQQQQQQQQQQQQQQQQQQLLLLLLLLFFFFFFFFFFFDDDDDDDDAAAAAKKKKKKKKKNNNNNNNNMMMMMMMMMMMMMMMMAAAAAAAAAACCCCCCDDDDDDDDPPPPPPPRRRRRRRRRRRHHHHHHHHHHGGGGRRRRRRRRRRRYYYYYYYYYYYYLLLLLLLLTTTTTTTAAAAAAAAAAAAAAAIIIIIIIIFFFFFFFFFFFRRRRRRRRRRRGGGGRRRRRRRRRRRMMMMMMMMSSSSSSMMMMMMMMKKKKKKKKKDDDDDDDDVVVVVVVDDDDDDDDEEEEEEEEEQQQQQQQQQMMMMMMMMLLLLLLLLNNNNNNNNIIIIIIIIQQQQQQQQQNNNNNNNNKKKKKKKKKNNNNNNNNSSSSSSAAAAAYYYYYYYYYYYYFFFFFFFFFFFVVVVVVVDDDDDDDDWWWWWWWWWWWWWWIIIIIIIIPPPPPPPNNNNNNNNNNNNNNNNVVVVVVVKKKKKKKKKTTTTTTTAAAAAVVVVVVVCCCCCCDDDDDDDDIIIIIIIIPPPPPPPPPPPPPPRRRRRRRRRRRDDDDDDDDLLLLLLLLKKKKKKKKKMMMMMMMMAAAAAAAAAATTTTTTTFFFFFFFFFFFIIIIIIIIGGGGNNNNNNNNSSSSSSTTTTTTTAAAAAIIIIIIIIQQQQQQQQQEEEEEEEEELLLLLLLLFFFFFFFFFFFKKKKKKKKKRRRRRRRRRRRVVVVVVVSSSSSSEEEEEEEEEQQQQQQQQQFFFFFFFFFFFTTTTTTTAAAAAMMMMMMMMFFFFFFFFFFFRRRRRRRRRRRRRRRRRRRRRRKKKKKKKKKAAAAAFFFFFFFFFFFLLLLLLLLHHHHHHHHHHWWWWWWWWWWWWWWYYYYYYYYYYYYTTTTTTTGGGGEEEEEEEEEGGGGMMMMMMMMDDDDDDDDEEEEEEEEEMMMMMMMMEEEEEEEEEFFFFFFFFFFFTTTTTTTEEEEEEEEEAAAAAEEEEEEEEESSSSSSNNNNNNNNMMMMMMMMNNNNNNNNDDDDDDDDLLLLLLLLVVVVVVVSSSSSSEEEEEEEEEYYYYYYYYYYYYQQQQQQQQQQQQQQQQQQYYYYYYYYYYYYQQQQQQQQQDDDDDDDDAAAAASSSSSSAAAAADDDDDDDDDDDDDDDDEEEEEEEEELLLLLLLLNNNNNNNNEEEEEEEEETTTTTTTIIIIIIIIEEEEEEEEEQQQQQQQQQAAAAAEEEEEEEEETTTTTTTEEEEEEEEEE

SEQ ID NO: 233 - protein, 3510 aa, Paracentrotus lividus
MMMMMMMMRRRRRRRRRRREEEEEEEEEIIIIIIIIVVVVVVVHHHHHHHHHHMMMMMMMMQQQQQQQQQAAAAAGGGGQQQQQQQQQCCCCCCGGGGNNNNNNNNQQQQQQQQQIIIIIIIIGGGGAAAAAKKKKKKKKKFFFFFFFFFFFWWWWWWWWWWWWWWEEEEEEEEEVVVVVVVIIIIIIIISSSSSSDDDDDDDDEEEEEEEEEHHHHHHHHHHGGGGIIIIIIIIDDDDDDDDPPPPPPPTTTTTTTGGGGTTTTTTTYYYYYYYYYYYYHHHHHHHHHHGGGGDDDDDDDDSSSSSSDDDDDDDDLLLLLLLLQQQQQQQQQLLLLLLLLEEEEEEEEERRRRRRRRRRRIIIIIIIINNNNNNNNVVVVVVVYYYYYYYYYYYYYYYYYYYYYYYYNNNNNNNNEEEEEEEEEAAAAATTTTTTTGGGGGGGGKKKKKKKKKYYYYYYYYYYYYVVVVVVVPPPPPPPRRRRRRRRRRRAAAAAVVVVVVVLLLLLLLLVVVVVVVDDDDDDDDLLLLLLLLEEEEEEEEEPPPPPPPGGGGTTTTTTTMMMMMMMMDDDDDDDDSSSSSSVVVVVVVRRRRRRRRRRRSSSSSSGGGGPPPPPPPFFFFFFFFFFFGGGGQQQQQQQQQIIIIIIIIFFFFFFFFFFFRRRRRRRRRRRPPPPPPPDDDDDDDDNNNNNNNNFFFFFFFFFFFVVVVVVVFFFFFFFFFFFGGGGQQQQQQQQQSSSSSSGGGGAAAAAGGGGNNNNNNNNNNNNNNNNWWWWWWWWWWWWWWAAAAAKKKKKKKKKGGGGHHHHHHHHHHYYYYYYYYYYYYTTTTTTTEEEEEEEEEGGGGAAAAAEEEEEEEEELLLLLLLLVVVVVVVDDDDDDDDSSSSSSVVVVVVVLLLLLLLLDDDDDDDDVVVVVVVVVVVVVVRRRRRRRRRRRKKKKKKKKKEEEEEEEEEAAAAAEEEEEEEEESSSSSSCCCCCCDDDDDDDDCCCCCCLLLLLLLLQQQQQQQQQGGGGFFFFFFFFFFFQQQQQQQQQLLLLLLLLTTTTTTTHHHHHHHHHHSSSSSSLLLLLLLLGGGGGGGGGGGGTTTTTTTGGGGSSSSSSGGGGMMMMMMMMGGGGTTTTTTTLLLLLLLLLLLLLLLLIIIIIIIISSSSSSKKKKKKKKKIIIIIIIIRRRRRRRRRRREEEEEEEEEEEEEEEEEEYYYYYYYYYYYYPPPPPPPDDDDDDDDRRRRRRRRRRRIIIIIIIIMMMMMMMMNNNNNNNNTTTTTTTFFFFFFFFFFFSSSSSSVVVVVVVVVVVVVVPPPPPPPSSSSSSPPPPPPPKKKKKKKKKVVVVVVVSSSSSSDDDDDDDDTTTTTTTVVVVVVVVVVVVVVEEEEEEEEEPPPPPPPYYYYYYYYYYYYNNNNNNNNAAAAATTTTTTTLLLLLLLLSSSSSSVVVVVVVHHHHHHHHHHQQQQQQQQQLLLLLLLLVVVVVVVEEEEEEEEENNNNNNNNTTTTTTTDDDDDDDDEEEEEEEEETTTTTTTYYYYYYYYYYYYCCCCCCIIIIIIIIDDDDDDDDNNNNNNNNEEEEEEEEEAAAAALLLLLLLLYYYYYYYYYYYYDDDDDDDDIIIIIIIICCCCCCFFFFFFFFFFFRRRRRRRRRRRTTTTTTTLLLLLLLLKKKKKKKKKLLLLLLLLTTTTTTTTTTTTTTPPPPPPPTTTTTTTYYYYYYYYYYYYGGGGDDDDDDDDLLLLLLLLNNNNNNNNHHHHHHHHHHLLLLLLLLVVVVVVVSSSSSSAAAAATTTTTTTMMMMMMMMSSSSSSGGGGVVVVVVVTTTTTTTTTTTTTTCCCCCCLLLLLLLLRRRRRRRRRRRFFFFFFFFFFFPPPPPPPGGGGQQQQQQQQQLLLLLLLLNNNNNNNNAAAAADDDDDDDDLLLLLLLLRRRRRRRRRRRKKKKKKKKKLLLLLLLLAAAAAVVVVVVVNNNNNNNNMMMMMMMMVVVVVVVPPPPPPPFFFFFFFFFFFPPPPPPPRRRRRRRRRRRLLLLLLLLHHHHHHHHHHFFFFFFFFFFFFFFFFFFFFFFMMMMMMMMPPPPPPPGGGGFFFFFFFFFFFAAAAAPPPPPPPLLLLLLLLTTTTTTTSSSSSSRRRRRRRRRRRGGGGSSSSSSQQQQQQQQQQQQQQQQQQYYYYYYYYYYYYRRRRRRRRRRRAAAAALLLLLLLLTTTTTTTVVVVVVVPPPPPPPEEEEEEEEELLLLLLLLTTTTTTTQQQQQQQQQQQQQQQQQQMMMMMMMMFFFFFFFFFFFDDDDDDDDAAAAAKKKKKKKKKNNNNNNNNMMMMMMMMMMMMMMMMAAAAAAAAAACCCCCCDDDDDDDDPPPPPPPRRRRRRRRRRRHHHHHHHHHHGGGGRRRRRRRRRRRYYYYYYYYYYYYLLLLLLLLTTTTTTTVVVVVVVAAAAAAAAAAIIIIIIIIFFFFFFFFFFFRRRRRRRRRRRGGGGRRRRRRRRRRRMMMMMMMMSSSSSSMMMMMMMMKKKKKKKKKEEEEEEEEEVVVVVVVDDDDDDDDEEEEEEEEEQQQQQQQQQMMMMMMMMLLLLLLLLNNNNNNNNVVVVVVVQQQQQQQQQNNNNNNNNKKKKKKKKKNNNNNNNNSSSSSSSSSSSSYYYYYYYYYYYYFFFFFFFFFFFVVVVVVVEEEEEEEEEWWWWWWWWWWWWWWIIIIIIIIPPPPPPPNNNNNNNNNNNNNNNNVVVVVVVKKKKKKKKKTTTTTTTAAAAAVVVVVVVCCCCCCDDDDDDDDIIIIIIIIPPPPPPPPPPPPPPRRRRRRRRRRRGGGGLLLLLLLLKKKKKKKKKMMMMMMMMSSSSSSAAAAATTTTTTTFFFFFFFFFFFIIIIIIIIGGGGNNNNNNNNSSSSSSTTTTTTTAAAAAIIIIIIIIQQQQQQQQQEEEEEEEEELLLLLLLLFFFFFFFFFFFKKKKKKKKKRRRRRRRRRRRIIIIIIIISSSSSSEEEEEEEEEQQQQQQQQQFFFFFFFFFFFTTTTTTTAAAAAMMMMMMMMFFFFFFFFFFFRRRRRRRRRRRRRRRRRRRRRRKKKKKKKKKAAAAAFFFFFFFFFFFLLLLLLLLHHHHHHHHHHWWWWWWWWWWWWWWYYYYYYYYYYYYTTTTTTTGGGGEEEEEEEEEGGGGMMMMMMMMDDDDDDDDEEEEEEEEEMMMMMMMMEEEEEEEEEFFFFFFFFFFFTTTTTTTEEEEEEEEEAAAAAEEEEEEEEESSSSSSNNNNNNNNMMMMMMMMNNNNNNNNDDDDDDDDLLLLLLLLVVVVVVVSSSSSSEEEEEEEEEYYYYYYYYYYYYQQQQQQQQQQQQQQQQQQYYYYYYYYYYYYQQQQQQQQQDDDDDDDDAAAAATTTTTTTAAAAAEEEEEEEEEEEEEEEEEEEEEEEEEEEGGGGEEEEEEEEEFFFFFFFFFFFDDDDDDDDEEEEEEEEEEEEEEEEEEEEEEEEEEEEEEEEEEEEGGGGDDDDDDDDEEEEEEEEEEEEEEEEEEAAAAAAAAAAA

SEQ ID NO: 234 - protein, 3498 aa, Penicillium digitatum
MMMMMMMMRRRRRRRRRRREEEEEEEEEIIIIIIIIVVVVVVVHHHHHHHHHHLLLLLLLLQQQQQQQQQTTTTTTTGGGGQQQQQQQQQCCCCCCGGGGNNNNNNNNQQQQQQQQQIIIIIIIIGGGGAAAAAAAAAAFFFFFFFFFFFWWWWWWWWWWWWWWQQQQQQQQQTTTTTTTIIIIIIIISSSSSSGGGGEEEEEEEEEHHHHHHHHHHGGGGLLLLLLLLDDDDDDDDGGGGDDDDDDDDGGGGQQQQQQQQQYYYYYYYYYYYYNNNNNNNNGGGGTTTTTTTSSSSSSDDDDDDDDLLLLLLLLQQQQQQQQQLLLLLLLLEEEEEEEEERRRRRRRRRRRMMMMMMMMNNNNNNNNVVVVVVVYYYYYYYYYYYYFFFFFFFFFFFNNNNNNNNHHHHHHHHHHAAAAASSSSSSGGGGDDDDDDDDKKKKKKKKKYYYYYYYYYYYYVVVVVVVPPPPPPPRRRRRRRRRRRAAAAAVVVVVVVLLLLLLLLVVVVVVVDDDDDDDDLLLLLLLLEEEEEEEEEPPPPPPPGGGGTTTTTTTMMMMMMMMDDDDDDDDAAAAAVVVVVVVRRRRRRRRRRRSSSSSSGGGGPPPPPPPFFFFFFFFFFFGGGGKKKKKKKKKLLLLLLLLFFFFFFFFFFFRRRRRRRRRRRPPPPPPPDDDDDDDDNNNNNNNNFFFFFFFFFFFVVVVVVVFFFFFFFFFFFGGGGQQQQQQQQQSSSSSSGGGGAAAAAGGGGNNNNNNNNNNNNNNNNWWWWWWWWWWWWWWAAAAAKKKKKKKKKGGGGHHHHHHHHHHYYYYYYYYYYYYTTTTTTTEEEEEEEEEGGGGAAAAAEEEEEEEEELLLLLLLLVVVVVVVDDDDDDDDQQQQQQQQQVVVVVVVLLLLLLLLDDDDDDDDVVVVVVVVVVVVVVRRRRRRRRRRRRRRRRRRRRRREEEEEEEEEAAAAAEEEEEEEEEGGGGCCCCCCDDDDDDDDCCCCCCLLLLLLLLQQQQQQQQQGGGGFFFFFFFFFFFQQQQQQQQQIIIIIIIITTTTTTTHHHHHHHHHHSSSSSSLLLLLLLLGGGGGGGGGGGGTTTTTTTGGGGAAAAAGGGGMMMMMMMMGGGGTTTTTTTLLLLLLLLLLLLLLLLIIIIIIIISSSSSSKKKKKKKKKIIIIIIIIRRRRRRRRRRREEEEEEEEEEEEEEEEEEFFFFFFFFFFFPPPPPPPDDDDDDDDRRRRRRRRRRRMMMMMMMMMMMMMMMMAAAAATTTTTTTFFFFFFFFFFFSSSSSSVVVVVVVVVVVVVVPPPPPPPSSSSSSPPPPPPPKKKKKKKKKVVVVVVVSSSSSSDDDDDDDDTTTTTTTVVVVVVVVVVVVVVEEEEEEEEEPPPPPPPYYYYYYYYYYYYNNNNNNNNAAAAATTTTTTTLLLLLLLLSSSSSSVVVVVVVHHHHHHHHHHQQQQQQQQQLLLLLLLLVVVVVVVEEEEEEEEEHHHHHHHHHHSSSSSSDDDDDDDDEEEEEEEEETTTTTTTFFFFFFFFFFFCCCCCCIIIIIIIIDDDDDDDDNNNNNNNNEEEEEEEEEAAAAALLLLLLLLYYYYYYYYYYYYDDDDDDDDIIIIIIIICCCCCCMMMMMMMMRRRRRRRRRRRTTTTTTTLLLLLLLLKKKKKKKKKLLLLLLLLSSSSSSQQQQQQQQQPPPPPPPSSSSSSYYYYYYYYYYYYGGGGDDDDDDDDLLLLLLLLNNNNNNNNHHHHHHHHHHLLLLLLLLVVVVVVVSSSSSSAAAAAVVVVVVVMMMMMMMMSSSSSSGGGGVVVVVVVTTTTTTTTTTTTTTSSSSSSLLLLLLLLRRRRRRRRRRRFFFFFFFFFFFPPPPPPPGGGGQQQQQQQQQLLLLLLLLNNNNNNNNSSSSSSDDDDDDDDLLLLLLLLRRRRRRRRRRRKKKKKKKKKLLLLLLLLAAAAAVVVVVVVNNNNNNNNMMMMMMMMVVVVVVVPPPPPPPFFFFFFFFFFFPPPPPPPRRRRRRRRRRRLLLLLLLLHHHHHHHHHHFFFFFFFFFFFFFFFFFFFFFFMMMMMMMMVVVVVVVGGGGFFFFFFFFFFFAAAAAPPPPPPPLLLLLLLLTTTTTTTSSSSSSRRRRRRRRRRRGGGGGGGGSSSSSSSSSSSSYYYYYYYYYYYYRRRRRRRRRRRQQQQQQQQQVVVVVVVSSSSSSVVVVVVVPPPPPPPEEEEEEEEELLLLLLLLTTTTTTTQQQQQQQQQQQQQQQQQQMMMMMMMMFFFFFFFFFFFDDDDDDDDPPPPPPPKKKKKKKKKNNNNNNNNMMMMMMMMMMMMMMMMAAAAAAAAAASSSSSSDDDDDDDDFFFFFFFFFFFRRRRRRRRRRRNNNNNNNNGGGGRRRRRRRRRRRYYYYYYYYYYYYLLLLLLLLTTTTTTTCCCCCCSSSSSSAAAAALLLLLLLLFFFFFFFFFFFRRRRRRRRRRRGGGGKKKKKKKKKIIIIIIIISSSSSSMMMMMMMMKKKKKKKKKEEEEEEEEEVVVVVVVEEEEEEEEEDDDDDDDDQQQQQQQQQMMMMMMMMRRRRRRRRRRRNNNNNNNNIIIIIIIIQQQQQQQQQNNNNNNNNKKKKKKKKKNNNNNNNNQQQQQQQQQSSSSSSYYYYYYYYYYYYFFFFFFFFFFFVVVVVVVEEEEEEEEEWWWWWWWWWWWWWWIIIIIIIIPPPPPPPNNNNNNNNNNNNNNNNVVVVVVVQQQQQQQQQTTTTTTTAAAAALLLLLLLLCCCCCCSSSSSSVVVVVVVPPPPPPPPPPPPPPRRRRRRRRRRRGGGGLLLLLLLLKKKKKKKKKMMMMMMMMSSSSSSSSSSSSTTTTTTTFFFFFFFFFFFVVVVVVVGGGGNNNNNNNNSSSSSSTTTTTTTSSSSSSIIIIIIIIQQQQQQQQQEEEEEEEEELLLLLLLLFFFFFFFFFFFKKKKKKKKKRRRRRRRRRRRVVVVVVVGGGGDDDDDDDDQQQQQQQQQFFFFFFFFFFFAAAAAAAAAAMMMMMMMMFFFFFFFFFFFRRRRRRRRRRRRRRRRRRRRRRKKKKKKKKKAAAAAFFFFFFFFFFFLLLLLLLLHHHHHHHHHHWWWWWWWWWWWWWWYYYYYYYYYYYYTTTTTTTGGGGEEEEEEEEEGGGGMMMMMMMMDDDDDDDDEEEEEEEEEMMMMMMMMEEEEEEEEEFFFFFFFFFFFTTTTTTTEEEEEEEEEAAAAAEEEEEEEEESSSSSSNNNNNNNNMMMMMMMMNNNNNNNNDDDDDDDDLLLLLLLLVVVVVVVSSSSSSEEEEEEEEEYYYYYYYYYYYYQQQQQQQQQQQQQQQQQQYYYYYYYYYYYYQQQQQQQQQEEEEEEEEEAAAAASSSSSSVVVVVVVSSSSSSEEEEEEEEEGGGGEEEEEEEEEEEEEEEEEEEEEEEEEEEYYYYYYYYYYYYLLLLLLLLAAAAAEEEEEEEEEDDDDDDDDIIIIIIIIVVVVVVVDDDDDDDDEEEEEEEEEEEEEEEEEEVVVVVVVV

SEQ ID NO: 235 - protein, 3494 aa, Pestalotiopsis microspora
MMMMMMMMRRRRRRRRRRREEEEEEEEEIIIIIIIIVVVVVVVHHHHHHHHHHLLLLLLLLQQQQQQQQQTTTTTTTGGGGQQQQQQQQQCCCCCCGGGGNNNNNNNNQQQQQQQQQIIIIIIIIGGGGAAAAAAAAAAFFFFFFFFFFFWWWWWWWWWWWWWWQQQQQQQQQTTTTTTTIIIIIIIISSSSSSGGGGEEEEEEEEEHHHHHHHHHHGGGGLLLLLLLLDDDDDDDDSSSSSSNNNNNNNNGGGGVVVVVVVYYYYYYYYYYYYNNNNNNNNGGGGTTTTTTTSSSSSSEEEEEEEEELLLLLLLLQQQQQQQQQLLLLLLLLEEEEEEEEERRRRRRRRRRRMMMMMMMMSSSSSSVVVVVVVYYYYYYYYYYYYFFFFFFFFFFFNNNNNNNNEEEEEEEEEAAAAASSSSSSGGGGNNNNNNNNKKKKKKKKKYYYYYYYYYYYYVVVVVVVPPPPPPPRRRRRRRRRRRAAAAAVVVVVVVLLLLLLLLVVVVVVVDDDDDDDDLLLLLLLLEEEEEEEEEPPPPPPPGGGGTTTTTTTMMMMMMMMDDDDDDDDAAAAAVVVVVVVRRRRRRRRRRRAAAAAGGGGPPPPPPPFFFFFFFFFFFGGGGQQQQQQQQQLLLLLLLLFFFFFFFFFFFRRRRRRRRRRRPPPPPPPDDDDDDDDNNNNNNNNFFFFFFFFFFFVVVVVVVFFFFFFFFFFFGGGGQQQQQQQQQSSSSSSGGGGAAAAAGGGGNNNNNNNNNNNNNNNNWWWWWWWWWWWWWWAAAAAKKKKKKKKKGGGGHHHHHHHHHHYYYYYYYYYYYYTTTTTTTEEEEEEEEEGGGGAAAAAEEEEEEEEELLLLLLLLVVVVVVVDDDDDDDDQQQQQQQQQVVVVVVVLLLLLLLLDDDDDDDDVVVVVVVVVVVVVVRRRRRRRRRRRRRRRRRRRRRREEEEEEEEEAAAAAEEEEEEEEEAAAAACCCCCCDDDDDDDDCCCCCCLLLLLLLLQQQQQQQQQGGGGFFFFFFFFFFFQQQQQQQQQIIIIIIIITTTTTTTHHHHHHHHHHSSSSSSLLLLLLLLGGGGGGGGGGGGTTTTTTTGGGGAAAAAGGGGMMMMMMMMGGGGTTTTTTTLLLLLLLLLLLLLLLLIIIIIIIISSSSSSKKKKKKKKKIIIIIIIIRRRRRRRRRRREEEEEEEEEEEEEEEEEEFFFFFFFFFFFPPPPPPPDDDDDDDDRRRRRRRRRRRMMMMMMMMMMMMMMMMAAAAATTTTTTTFFFFFFFFFFFSSSSSSVVVVVVVVVVVVVVPPPPPPPSSSSSSPPPPPPPKKKKKKKKKVVVVVVVSSSSSSDDDDDDDDTTTTTTTVVVVVVVVVVVVVVEEEEEEEEEPPPPPPPYYYYYYYYYYYYNNNNNNNNAAAAATTTTTTTLLLLLLLLSSSSSSVVVVVVVHHHHHHHHHHQQQQQQQQQLLLLLLLLVVVVVVVEEEEEEEEENNNNNNNNSSSSSSDDDDDDDDEEEEEEEEETTTTTTTFFFFFFFFFFFCCCCCCIIIIIIIIDDDDDDDDNNNNNNNNEEEEEEEEEAAAAALLLLLLLLYYYYYYYYYYYYDDDDDDDDIIIIIIIICCCCCCMMMMMMMMRRRRRRRRRRRTTTTTTTLLLLLLLLKKKKKKKKKLLLLLLLLSSSSSSNNNNNNNNPPPPPPPSSSSSSYYYYYYYYYYYYGGGGDDDDDDDDLLLLLLLLNNNNNNNNHHHHHHHHHHLLLLLLLLVVVVVVVSSSSSSAAAAAVVVVVVVMMMMMMMMSSSSSSGGGGVVVVVVVTTTTTTTTTTTTTTCCCCCCLLLLLLLLRRRRRRRRRRRFFFFFFFFFFFPPPPPPPGGGGQQQQQQQQQLLLLLLLLNNNNNNNNSSSSSSDDDDDDDDLLLLLLLLRRRRRRRRRRRKKKKKKKKKLLLLLLLLAAAAAVVVVVVVNNNNNNNNMMMMMMMMVVVVVVVPPPPPPPFFFFFFFFFFFPPPPPPPRRRRRRRRRRRLLLLLLLLHHHHHHHHHHFFFFFFFFFFFFFFFFFFFFFFMMMMMMMMVVVVVVVGGGGFFFFFFFFFFFAAAAAPPPPPPPLLLLLLLLTTTTTTTSSSSSSRRRRRRRRRRRGGGGAAAAAHHHHHHHHHHSSSSSSFFFFFFFFFFFRRRRRRRRRRRAAAAAVVVVVVVTTTTTTTVVVVVVVPPPPPPPEEEEEEEEELLLLLLLLTTTTTTTQQQQQQQQQQQQQQQQQQMMMMMMMMFFFFFFFFFFFDDDDDDDDPPPPPPPKKKKKKKKKNNNNNNNNMMMMMMMMMMMMMMMMAAAAAAAAAASSSSSSDDDDDDDDFFFFFFFFFFFRRRRRRRRRRRNNNNNNNNGGGGRRRRRRRRRRRYYYYYYYYYYYYLLLLLLLLTTTTTTTCCCCCCSSSSSSAAAAAIIIIIIIIFFFFFFFFFFFRRRRRRRRRRRGGGGKKKKKKKKKVVVVVVVSSSSSSMMMMMMMMKKKKKKKKKEEEEEEEEEVVVVVVVEEEEEEEEEDDDDDDDDQQQQQQQQQMMMMMMMMRRRRRRRRRRRNNNNNNNNVVVVVVVQQQQQQQQQNNNNNNNNKKKKKKKKKNNNNNNNNSSSSSSSSSSSSYYYYYYYYYYYYFFFFFFFFFFFVVVVVVVEEEEEEEEEWWWWWWWWWWWWWWIIIIIIIIPPPPPPPNNNNNNNNNNNNNNNNVVVVVVVQQQQQQQQQTTTTTTTAAAAALLLLLLLLCCCCCCSSSSSSIIIIIIIIPPPPPPPPPPPPPPRRRRRRRRRRRGGGGLLLLLLLLKKKKKKKKKMMMMMMMMSSSSSSSSSSSSTTTTTTTFFFFFFFFFFFVVVVVVVGGGGNNNNNNNNSSSSSSTTTTTTTAAAAAIIIIIIIIQQQQQQQQQEEEEEEEEELLLLLLLLFFFFFFFFFFFKKKKKKKKKRRRRRRRRRRRIIIIIIIIGGGGEEEEEEEEEQQQQQQQQQFFFFFFFFFFFTTTTTTTAAAAAMMMMMMMMFFFFFFFFFFFRRRRRRRRRRRRRRRRRRRRRRKKKKKKKKKAAAAAFFFFFFFFFFFLLLLLLLLHHHHHHHHHHWWWWWWWWWWWWWWYYYYYYYYYYYYTTTTTTTGGGGEEEEEEEEEGGGGMMMMMMMMDDDDDDDDEEEEEEEEEMMMMMMMMEEEEEEEEEFFFFFFFFFFFTTTTTTTEEEEEEEEEAAAAAEEEEEEEEESSSSSSNNNNNNNNMMMMMMMMNNNNNNNNDDDDDDDDLLLLLLLLVVVVVVVSSSSSSEEEEEEEEEYYYYYYYYYYYYQQQQQQQQQQQQQQQQQQYYYYYYYYYYYYQQQQQQQQQDDDDDDDDAAAAAGGGGVVVVVVVDDDDDDDDEEEEEEEEEEEEEEEEEEEEEEEEEEEEEEEEEEEEEEEEEEEEEYYYYYYYYYYYYEEEEEEEEEEEEEEEEEEEEEEEEEEEPPPPPPPLLLLLLLLPPPPPPPEEEEEEEEEDDDDDDDDEEEEEEEEEE

SEQ ID NO: 236 - protein, 3502 aa, Phaeosphaeria nodorum
MMMMMMMMRRRRRRRRRRREEEEEEEEEIIIIIIIIVVVVVVVYYYYYYYYYYYYLLLLLLLLQQQQQQQQQTTTTTTTGGGGQQQQQQQQQCCCCCCGGGGNNNNNNNNQQQQQQQQQIIIIIIIIGGGGAAAAAAAAAAFFFFFFFFFFFWWWWWWWWWWWWWWQQQQQQQQQTTTTTTTIIIIIIIISSSSSSGGGGEEEEEEEEEHHHHHHHHHHGGGGLLLLLLLLDDDDDDDDGGGGSSSSSSGGGGVVVVVVVYYYYYYYYYYYYNNNNNNNNGGGGTTTTTTTSSSSSSDDDDDDDDLLLLLLLLQQQQQQQQQLLLLLLLLEEEEEEEEERRRRRRRRRRRMMMMMMMMNNNNNNNNVVVVVVVYYYYYYYYYYYYFFFFFFFFFFFNNNNNNNNEEEEEEEEEAAAAASSSSSSGGGGNNNNNNNNKKKKKKKKKFFFFFFFFFFFVVVVVVVPPPPPPPRRRRRRRRRRRAAAAAVVVVVVVLLLLLLLLVVVVVVVDDDDDDDDLLLLLLLLEEEEEEEEEPPPPPPPGGGGTTTTTTTMMMMMMMMDDDDDDDDAAAAAVVVVVVVRRRRRRRRRRRAAAAAGGGGPPPPPPPFFFFFFFFFFFGGGGQQQQQQQQQLLLLLLLLFFFFFFFFFFFRRRRRRRRRRRPPPPPPPDDDDDDDDNNNNNNNNFFFFFFFFFFFVVVVVVVFFFFFFFFFFFGGGGQQQQQQQQQSSSSSSGGGGAAAAAGGGGNNNNNNNNNNNNNNNNWWWWWWWWWWWWWWAAAAAKKKKKKKKKGGGGHHHHHHHHHHYYYYYYYYYYYYTTTTTTTEEEEEEEEEGGGGAAAAAEEEEEEEEELLLLLLLLVVVVVVVDDDDDDDDQQQQQQQQQVVVVVVVLLLLLLLLDDDDDDDDVVVVVVVVVVVVVVRRRRRRRRRRRRRRRRRRRRRREEEEEEEEERRRRRRRRRRREEEEEEEEEGGGGCCCCCCDDDDDDDDCCCCCCLLLLLLLLQQQQQQQQQGGGGFFFFFFFFFFFQQQQQQQQQIIIIIIIITTTTTTTHHHHHHHHHHSSSSSSLLLLLLLLGGGGGGGGGGGGTTTTTTTGGGGAAAAAGGGGMMMMMMMMGGGGTTTTTTTLLLLLLLLLLLLLLLLIIIIIIIISSSSSSKKKKKKKKKIIIIIIIIRRRRRRRRRRREEEEEEEEEEEEEEEEEEFFFFFFFFFFFPPPPPPPDDDDDDDDRRRRRRRRRRRMMMMMMMMMMMMMMMMAAAAATTTTTTTFFFFFFFFFFFSSSSSSVVVVVVVVVVVVVVPPPPPPPSSSSSSPPPPPPPKKKKKKKKKVVVVVVVSSSSSSDDDDDDDDTTTTTTTVVVVVVVVVVVVVVEEEEEEEEEPPPPPPPYYYYYYYYYYYYNNNNNNNNAAAAATTTTTTTLLLLLLLLSSSSSSIIIIIIIIHHHHHHHHHHQQQQQQQQQLLLLLLLLVVVVVVVEEEEEEEEENNNNNNNNSSSSSSDDDDDDDDEEEEEEEEETTTTTTTFFFFFFFFFFFCCCCCCIIIIIIIIDDDDDDDDNNNNNNNNEEEEEEEEEAAAAALLLLLLLLYYYYYYYYYYYYDDDDDDDDIIIIIIIICCCCCCMMMMMMMMRRRRRRRRRRRTTTTTTTLLLLLLLLKKKKKKKKKLLLLLLLLNNNNNNNNNNNNNNNNPPPPPPPSSSSSSYYYYYYYYYYYYGGGGDDDDDDDDLLLLLLLLNNNNNNNNHHHHHHHHHHLLLLLLLLVVVVVVVSSSSSSAAAAAVVVVVVVMMMMMMMMSSSSSSGGGGVVVVVVVTTTTTTTTTTTTTTCCCCCCLLLLLLLLRRRRRRRRRRRFFFFFFFFFFFPPPPPPPGGGGQQQQQQQQQLLLLLLLLNNNNNNNNSSSSSSDDDDDDDDLLLLLLLLRRRRRRRRRRRKKKKKKKKKLLLLLLLLAAAAAVVVVVVVNNNNNNNNMMMMMMMMVVVVVVVPPPPPPPFFFFFFFFFFFPPPPPPPRRRRRRRRRRRLLLLLLLLHHHHHHHHHHFFFFFFFFFFFFFFFFFFFFFFMMMMMMMMVVVVVVVGGGGFFFFFFFFFFFAAAAAPPPPPPPLLLLLLLLTTTTTTTSSSSSSRRRRRRRRRRRGGGGAAAAAHHHHHHHHHHSSSSSSFFFFFFFFFFFRRRRRRRRRRRAAAAAVVVVVVVTTTTTTTVVVVVVVPPPPPPPEEEEEEEEELLLLLLLLTTTTTTTQQQQQQQQQQQQQQQQQQMMMMMMMMFFFFFFFFFFFDDDDDDDDPPPPPPPKKKKKKKKKNNNNNNNNMMMMMMMMMMMMMMMMAAAAAAAAAASSSSSSDDDDDDDDFFFFFFFFFFFRRRRRRRRRRRNNNNNNNNGGGGRRRRRRRRRRRYYYYYYYYYYYYLLLLLLLLTTTTTTTCCCCCCSSSSSSAAAAAYYYYYYYYYYYYFFFFFFFFFFFRRRRRRRRRRRGGGGKKKKKKKKKVVVVVVVSSSSSSMMMMMMMMKKKKKKKKKEEEEEEEEEVVVVVVVEEEEEEEEEDDDDDDDDQQQQQQQQQMMMMMMMMRRRRRRRRRRRNNNNNNNNVVVVVVVQQQQQQQQQNNNNNNNNKKKKKKKKKNNNNNNNNSSSSSSSSSSSSYYYYYYYYYYYYFFFFFFFFFFFVVVVVVVEEEEEEEEEWWWWWWWWWWWWWWIIIIIIIIPPPPPPPNNNNNNNNNNNNNNNNVVVVVVVQQQQQQQQQTTTTTTTAAAAALLLLLLLLCCCCCCSSSSSSVVVVVVVPPPPPPPPPPPPPPRRRRRRRRRRRGGGGLLLLLLLLKKKKKKKKKMMMMMMMMSSSSSSAAAAATTTTTTTFFFFFFFFFFFVVVVVVVGGGGNNNNNNNNSSSSSSTTTTTTTSSSSSSIIIIIIIIQQQQQQQQQEEEEEEEEELLLLLLLLFFFFFFFFFFFKKKKKKKKKRRRRRRRRRRRIIIIIIIIGGGGDDDDDDDDQQQQQQQQQFFFFFFFFFFFTTTTTTTAAAAAMMMMMMMMFFFFFFFFFFFRRRRRRRRRRRRRRRRRRRRRRKKKKKKKKKAAAAAFFFFFFFFFFFLLLLLLLLHHHHHHHHHHWWWWWWWWWWWWWWYYYYYYYYYYYYTTTTTTTGGGGEEEEEEEEEGGGGMMMMMMMMDDDDDDDDEEEEEEEEEMMMMMMMMEEEEEEEEEFFFFFFFFFFFTTTTTTTEEEEEEEEEAAAAAEEEEEEEEESSSSSSNNNNNNNNMMMMMMMMNNNNNNNNDDDDDDDDLLLLLLLLVVVVVVVSSSSSSEEEEEEEEEYYYYYYYYYYYYQQQQQQQQQQQQQQQQQQYYYYYYYYYYYYQQQQQQQQQEEEEEEEEEAAAAASSSSSSIIIIIIIISSSSSSEEEEEEEEEGGGGEEEEEEEEEEEEEEEEEEEEEEEEEEEYYYYYYYYYYYYDDDDDDDDEEEEEEEEEEEEEEEEEEAAAAAPPPPPPPLLLLLLLLEEEEEEEEEAAAAAEEEEEEEEEEEEEEEEEEE

SEQ ID NO: 237 - protein, 3496 aa, Phytophthora cinnamomi
MMMMMMMMRRRRRRRRRRREEEEEEEEELLLLLLLLVVVVVVVHHHHHHHHHHIIIIIIIIQQQQQQQQQGGGGGGGGQQQQQQQQQCCCCCCGGGGNNNNNNNNQQQQQQQQQIIIIIIIIGGGGAAAAAKKKKKKKKKFFFFFFFFFFFWWWWWWWWWWWWWWEEEEEEEEEVVVVVVVIIIIIIIISSSSSSDDDDDDDDEEEEEEEEEHHHHHHHHHHGGGGVVVVVVVDDDDDDDDPPPPPPPTTTTTTTGGGGSSSSSSYYYYYYYYYYYYHHHHHHHHHHGGGGDDDDDDDDSSSSSSDDDDDDDDLLLLLLLLQQQQQQQQQLLLLLLLLEEEEEEEEERRRRRRRRRRRIIIIIIIINNNNNNNNVVVVVVVYYYYYYYYYYYYYYYYYYYYYYYYNNNNNNNNEEEEEEEEEAAAAATTTTTTTGGGGGGGGRRRRRRRRRRRYYYYYYYYYYYYVVVVVVVPPPPPPPRRRRRRRRRRRAAAAAIIIIIIIILLLLLLLLMMMMMMMMDDDDDDDDLLLLLLLLEEEEEEEEEPPPPPPPGGGGTTTTTTTMMMMMMMMDDDDDDDDSSSSSSVVVVVVVRRRRRRRRRRRAAAAAGGGGPPPPPPPYYYYYYYYYYYYGGGGQQQQQQQQQLLLLLLLLFFFFFFFFFFFRRRRRRRRRRRPPPPPPPDDDDDDDDNNNNNNNNFFFFFFFFFFFVVVVVVVFFFFFFFFFFFGGGGQQQQQQQQQTTTTTTTGGGGAAAAAGGGGNNNNNNNNNNNNNNNNWWWWWWWWWWWWWWAAAAAKKKKKKKKKGGGGHHHHHHHHHHYYYYYYYYYYYYTTTTTTTEEEEEEEEEGGGGAAAAAEEEEEEEEELLLLLLLLIIIIIIIIDDDDDDDDSSSSSSVVVVVVVLLLLLLLLDDDDDDDDVVVVVVVVVVVVVVRRRRRRRRRRRKKKKKKKKKEEEEEEEEEAAAAAEEEEEEEEESSSSSSCCCCCCDDDDDDDDCCCCCCLLLLLLLLQQQQQQQQQGGGGFFFFFFFFFFFQQQQQQQQQIIIIIIIITTTTTTTHHHHHHHHHHSSSSSSLLLLLLLLGGGGGGGGGGGGTTTTTTTGGGGSSSSSSGGGGMMMMMMMMGGGGTTTTTTTLLLLLLLLLLLLLLLLIIIIIIIISSSSSSKKKKKKKKKIIIIIIIIRRRRRRRRRRREEEEEEEEEEEEEEEEEEYYYYYYYYYYYYPPPPPPPDDDDDDDDRRRRRRRRRRRIIIIIIIIMMMMMMMMCCCCCCTTTTTTTYYYYYYYYYYYYSSSSSSVVVVVVVCCCCCCPPPPPPPSSSSSSPPPPPPPKKKKKKKKKVVVVVVVSSSSSSDDDDDDDDTTTTTTTVVVVVVVVVVVVVVEEEEEEEEEPPPPPPPYYYYYYYYYYYYNNNNNNNNAAAAATTTTTTTLLLLLLLLSSSSSSVVVVVVVHHHHHHHHHHQQQQQQQQQLLLLLLLLVVVVVVVEEEEEEEEENNNNNNNNAAAAADDDDDDDDEEEEEEEEEVVVVVVVMMMMMMMMCCCCCCLLLLLLLLDDDDDDDDNNNNNNNNEEEEEEEEEAAAAALLLLLLLLYYYYYYYYYYYYDDDDDDDDIIIIIIIICCCCCCFFFFFFFFFFFRRRRRRRRRRRTTTTTTTLLLLLLLLKKKKKKKKKLLLLLLLLTTTTTTTNNNNNNNNPPPPPPPTTTTTTTYYYYYYYYYYYYGGGGDDDDDDDDLLLLLLLLNNNNNNNNHHHHHHHHHHLLLLLLLLVVVVVVVCCCCCCAAAAAAAAAAMMMMMMMMSSSSSSGGGGIIIIIIIITTTTTTTTTTTTTTCCCCCCLLLLLLLLRRRRRRRRRRRFFFFFFFFFFFPPPPPPPGGGGQQQQQQQQQLLLLLLLLNNNNNNNNSSSSSSVVVVVVVLLLLLLLLKKKKKKKKKLLLLLLLLFFFFFFFFFFFAAAAAVVVVVVVNNNNNNNNLLLLLLLLIIIIIIIIPPPPPPPFFFFFFFFFFFPPPPPPPRRRRRRRRRRRLLLLLLLLHHHHHHHHHHFFFFFFFFFFFFFFFFFFFFFFMMMMMMMMIIIIIIIIGGGGFFFFFFFFFFFAAAAAPPPPPPPLLLLLLLLTTTTTTTSSSSSSRRRRRRRRRRRGGGGSSSSSSQQQQQQQQQQQQQQQQQQYYYYYYYYYYYYRRRRRRRRRRRAAAAALLLLLLLLTTTTTTTVVVVVVVPPPPPPPEEEEEEEEELLLLLLLLTTTTTTTQQQQQQQQQQQQQQQQQQQQQQQQQQQFFFFFFFFFFFDDDDDDDDAAAAAKKKKKKKKKNNNNNNNNMMMMMMMMMMMMMMMMCCCCCCAAAAAAAAAADDDDDDDDPPPPPPPRRRRRRRRRRRHHHHHHHHHHGGGGRRRRRRRRRRRYYYYYYYYYYYYLLLLLLLLTTTTTTTAAAAAAAAAACCCCCCMMMMMMMMFFFFFFFFFFFRRRRRRRRRRRGGGGRRRRRRRRRRRMMMMMMMMSSSSSSTTTTTTTKKKKKKKKKEEEEEEEEEVVVVVVVDDDDDDDDEEEEEEEEEQQQQQQQQQMMMMMMMMLLLLLLLLNNNNNNNNVVVVVVVQQQQQQQQQNNNNNNNNKKKKKKKKKNNNNNNNNSSSSSSSSSSSSYYYYYYYYYYYYFFFFFFFFFFFVVVVVVVEEEEEEEEEWWWWWWWWWWWWWWIIIIIIIIPPPPPPPNNNNNNNNNNNNNNNNIIIIIIIIKKKKKKKKKAAAAASSSSSSVVVVVVVCCCCCCDDDDDDDDIIIIIIIIPPPPPPPPPPPPPPQQQQQQQQQGGGGLLLLLLLLKKKKKKKKKMMMMMMMMSSSSSSTTTTTTTTTTTTTTFFFFFFFFFFFIIIIIIIIGGGGNNNNNNNNSSSSSSTTTTTTTAAAAAIIIIIIIIQQQQQQQQQEEEEEEEEEMMMMMMMMFFFFFFFFFFFKKKKKKKKKRRRRRRRRRRRVVVVVVVSSSSSSEEEEEEEEEQQQQQQQQQFFFFFFFFFFFTTTTTTTAAAAAMMMMMMMMFFFFFFFFFFFRRRRRRRRRRRRRRRRRRRRRRKKKKKKKKKAAAAAFFFFFFFFFFFLLLLLLLLHHHHHHHHHHWWWWWWWWWWWWWWYYYYYYYYYYYYTTTTTTTGGGGEEEEEEEEEGGGGMMMMMMMMDDDDDDDDEEEEEEEEEMMMMMMMMEEEEEEEEEFFFFFFFFFFFTTTTTTTEEEEEEEEEAAAAAEEEEEEEEESSSSSSNNNNNNNNMMMMMMMMNNNNNNNNDDDDDDDDLLLLLLLLVVVVVVVSSSSSSEEEEEEEEEYYYYYYYYYYYYQQQQQQQQQQQQQQQQQQYYYYYYYYYYYYQQQQQQQQQDDDDDDDDGGGGTTTTTTTAAAAAEEEEEEEEEEEEEEEEEEEEEEEEEEEGGGGEEEEEEEEEFFFFFFFFFFFDDDDDDDDEEEEEEEEEDDDDDDDDEEEEEEEEEEEEEEEEEEWWWWWWWWWWWWWWMMMMMMMMRRRRRRRRRRRR

SEQ ID NO: 238 - protein, 3498 aa, Sus scrofa
MMMMMMMMRRRRRRRRRRREEEEEEEEEIIIIIIIIVVVVVVVHHHHHHHHHHIIIIIIIIQQQQQQQQQAAAAAGGGGQQQQQQQQQCCCCCCGGGGNNNNNNNNQQQQQQQQQIIIIIIIIGGGGAAAAAKKKKKKKKKFFFFFFFFFFFWWWWWWWWWWWWWWEEEEEEEEEVVVVVVVIIIIIIIISSSSSSDDDDDDDDEEEEEEEEEHHHHHHHHHHGGGGIIIIIIIIDDDDDDDDPPPPPPPTTTTTTTGGGGSSSSSSYYYYYYYYYYYYHHHHHHHHHHGGGGDDDDDDDDSSSSSSDDDDDDDDLLLLLLLLQQQQQQQQQLLLLLLLLEEEEEEEEERRRRRRRRRRRIIIIIIIINNNNNNNNVVVVVVVYYYYYYYYYYYYYYYYYYYYYYYYNNNNNNNNEEEEEEEEEAAAAAAAAAAGGGGNNNNNNNNKKKKKKKKKYYYYYYYYYYYYVVVVVVVPPPPPPPRRRRRRRRRRRAAAAAIIIIIIIILLLLLLLLVVVVVVVDDDDDDDDLLLLLLLLEEEEEEEEEPPPPPPPGGGGTTTTTTTMMMMMMMMDDDDDDDDSSSSSSVVVVVVVRRRRRRRRRRRSSSSSSGGGGPPPPPPPFFFFFFFFFFFGGGGQQQQQQQQQIIIIIIIIFFFFFFFFFFFRRRRRRRRRRRPPPPPPPDDDDDDDDNNNNNNNNFFFFFFFFFFFVVVVVVVFFFFFFFFFFFGGGGQQQQQQQQQSSSSSSGGGGAAAAAGGGGNNNNNNNNNNNNNNNNWWWWWWWWWWWWWWAAAAAKKKKKKKKKGGGGHHHHHHHHHHYYYYYYYYYYYYTTTTTTTEEEEEEEEEGGGGAAAAAEEEEEEEEELLLLLLLLVVVVVVVDDDDDDDDSSSSSSVVVVVVVLLLLLLLLDDDDDDDDVVVVVVVVVVVVVVRRRRRRRRRRRKKKKKKKKKEEEEEEEEESSSSSSEEEEEEEEESSSSSSCCCCCCDDDDDDDDCCCCCCLLLLLLLLQQQQQQQQQGGGGFFFFFFFFFFFQQQQQQQQQLLLLLLLLTTTTTTTHHHHHHHHHHSSSSSSLLLLLLLLGGGGGGGGGGGGTTTTTTTGGGGSSSSSSGGGGMMMMMMMMGGGGTTTTTTTLLLLLLLLLLLLLLLLIIIIIIIISSSSSSKKKKKKKKKIIIIIIIIRRRRRRRRRRREEEEEEEEEEEEEEEEEEYYYYYYYYYYYYPPPPPPPDDDDDDDDRRRRRRRRRRRIIIIIIIIMMMMMMMMNNNNNNNNTTTTTTTFFFFFFFFFFFSSSSSSVVVVVVVVVVVVVVPPPPPPPSSSSSSPPPPPPPKKKKKKKKKVVVVVVVSSSSSSDDDDDDDDTTTTTTTVVVVVVVVVVVVVVEEEEEEEEEPPPPPPPYYYYYYYYYYYYNNNNNNNNAAAAATTTTTTTLLLLLLLLSSSSSSVVVVVVVHHHHHHHHHHQQQQQQQQQLLLLLLLLVVVVVVVEEEEEEEEENNNNNNNNTTTTTTTDDDDDDDDEEEEEEEEETTTTTTTYYYYYYYYYYYYCCCCCCIIIIIIIIDDDDDDDDNNNNNNNNEEEEEEEEEAAAAALLLLLLLLYYYYYYYYYYYYDDDDDDDDIIIIIIIICCCCCCFFFFFFFFFFFRRRRRRRRRRRTTTTTTTLLLLLLLLKKKKKKKKKLLLLLLLLTTTTTTTTTTTTTTPPPPPPPTTTTTTTYYYYYYYYYYYYGGGGDDDDDDDDLLLLLLLLNNNNNNNNHHHHHHHHHHLLLLLLLLVVVVVVVSSSSSSAAAAATTTTTTTMMMMMMMMSSSSSSGGGGVVVVVVVTTTTTTTTTTTTTTCCCCCCLLLLLLLLRRRRRRRRRRRFFFFFFFFFFFPPPPPPPGGGGQQQQQQQQQLLLLLLLLNNNNNNNNAAAAADDDDDDDDLLLLLLLLRRRRRRRRRRRKKKKKKKKKLLLLLLLLAAAAAVVVVVVVNNNNNNNNMMMMMMMMVVVVVVVPPPPPPPFFFFFFFFFFFPPPPPPPRRRRRRRRRRRLLLLLLLLHHHHHHHHHHFFFFFFFFFFFFFFFFFFFFFFMMMMMMMMPPPPPPPGGGGFFFFFFFFFFFAAAAAPPPPPPPLLLLLLLLTTTTTTTSSSSSSRRRRRRRRRRRGGGGSSSSSSQQQQQQQQQQQQQQQQQQYYYYYYYYYYYYRRRRRRRRRRRAAAAALLLLLLLLTTTTTTTVVVVVVVPPPPPPPEEEEEEEEELLLLLLLLTTTTTTTQQQQQQQQQQQQQQQQQQMMMMMMMMFFFFFFFFFFFDDDDDDDDAAAAAKKKKKKKKKNNNNNNNNMMMMMMMMMMMMMMMMAAAAAAAAAACCCCCCDDDDDDDDPPPPPPPRRRRRRRRRRRHHHHHHHHHHGGGGRRRRRRRRRRRYYYYYYYYYYYYLLLLLLLLTTTTTTTVVVVVVVAAAAAAAAAAVVVVVVVFFFFFFFFFFFRRRRRRRRRRRGGGGRRRRRRRRRRRMMMMMMMMSSSSSSMMMMMMMMKKKKKKKKKEEEEEEEEEVVVVVVVDDDDDDDDEEEEEEEEEQQQQQQQQQMMMMMMMMLLLLLLLLNNNNNNNNVVVVVVVQQQQQQQQQNNNNNNNNKKKKKKKKKNNNNNNNNSSSSSSSSSSSSYYYYYYYYYYYYFFFFFFFFFFFVVVVVVVEEEEEEEEEWWWWWWWWWWWWWWIIIIIIIIPPPPPPPNNNNNNNNNNNNNNNNVVVVVVVKKKKKKKKKTTTTTTTAAAAAVVVVVVVCCCCCCDDDDDDDDIIIIIIIIPPPPPPPPPPPPPPRRRRRRRRRRRGGGGLLLLLLLLKKKKKKKKKMMMMMMMMSSSSSSAAAAATTTTTTTFFFFFFFFFFFIIIIIIIIGGGGNNNNNNNNSSSSSSTTTTTTTAAAAAIIIIIIIIQQQQQQQQQEEEEEEEEELLLLLLLLFFFFFFFFFFFKKKKKKKKKRRRRRRRRRRRIIIIIIIISSSSSSEEEEEEEEEQQQQQQQQQFFFFFFFFFFFTTTTTTTAAAAAMMMMMMMMFFFFFFFFFFFRRRRRRRRRRRRRRRRRRRRRRKKKKKKKKKAAAAAFFFFFFFFFFFLLLLLLLLHHHHHHHHHHWWWWWWWWWWWWWWYYYYYYYYYYYYTTTTTTTGGGGEEEEEEEEEGGGGMMMMMMMMDDDDDDDDEEEEEEEEEMMMMMMMMEEEEEEEEEFFFFFFFFFFFTTTTTTTEEEEEEEEEAAAAAEEEEEEEEESSSSSSNNNNNNNNMMMMMMMMNNNNNNNNDDDDDDDDLLLLLLLLVVVVVVVSSSSSSEEEEEEEEEYYYYYYYYYYYYQQQQQQQQQQQQQQQQQQYYYYYYYYYYYYQQQQQQQQQDDDDDDDDAAAAATTTTTTTAAAAADDDDDDDDEEEEEEEEEQQQQQQQQQGGGGEEEEEEEEEFFFFFFFFFFFEEEEEEEEEEEEEEEEEEEEEEEEEEEGGGGEEEEEEEEEEEEEEEEEEDDDDDDDDEEEEEEEEEAAAAAA

SEQ ID NO: 239 - protein, 3494 aa, Plasmodium falciparum
MMMMMMMMRRRRRRRRRRREEEEEEEEEIIIIIIIIVVVVVVVHHHHHHHHHHIIIIIIIIQQQQQQQQQAAAAAGGGGQQQQQQQQQCCCCCCGGGGNNNNNNNNQQQQQQQQQIIIIIIIIGGGGAAAAAKKKKKKKKKFFFFFFFFFFFWWWWWWWWWWWWWWEEEEEEEEEVVVVVVVIIIIIIIISSSSSSDDDDDDDDEEEEEEEEEHHHHHHHHHHGGGGIIIIIIIIDDDDDDDDPPPPPPPSSSSSSGGGGTTTTTTTYYYYYYYYYYYYSSSSSSGGGGDDDDDDDDSSSSSSDDDDDDDDLLLLLLLLQQQQQQQQQLLLLLLLLEEEEEEEEERRRRRRRRRRRVVVVVVVDDDDDDDDVVVVVVVFFFFFFFFFFFYYYYYYYYYYYYNNNNNNNNEEEEEEEEEAAAAATTTTTTTGGGGGGGGRRRRRRRRRRRYYYYYYYYYYYYVVVVVVVPPPPPPPRRRRRRRRRRRAAAAAIIIIIIIILLLLLLLLMMMMMMMMDDDDDDDDLLLLLLLLEEEEEEEEEPPPPPPPGGGGTTTTTTTMMMMMMMMDDDDDDDDSSSSSSVVVVVVVRRRRRRRRRRRAAAAAGGGGPPPPPPPFFFFFFFFFFFGGGGQQQQQQQQQLLLLLLLLFFFFFFFFFFFRRRRRRRRRRRPPPPPPPDDDDDDDDNNNNNNNNFFFFFFFFFFFVVVVVVVFFFFFFFFFFFGGGGQQQQQQQQQTTTTTTTGGGGAAAAAGGGGNNNNNNNNNNNNNNNNWWWWWWWWWWWWWWAAAAAKKKKKKKKKGGGGHHHHHHHHHHYYYYYYYYYYYYTTTTTTTEEEEEEEEEGGGGAAAAAEEEEEEEEELLLLLLLLIIIIIIIIDDDDDDDDAAAAAVVVVVVVLLLLLLLLDDDDDDDDVVVVVVVLLLLLLLLRRRRRRRRRRRKKKKKKKKKEEEEEEEEEAAAAAEEEEEEEEEGGGGCCCCCCDDDDDDDDCCCCCCLLLLLLLLQQQQQQQQQGGGGFFFFFFFFFFFQQQQQQQQQIIIIIIIITTTTTTTHHHHHHHHHHSSSSSSLLLLLLLLGGGGGGGGGGGGTTTTTTTGGGGSSSSSSGGGGMMMMMMMMGGGGTTTTTTTLLLLLLLLLLLLLLLLIIIIIIIISSSSSSKKKKKKKKKIIIIIIIIRRRRRRRRRRREEEEEEEEEEEEEEEEEEYYYYYYYYYYYYPPPPPPPDDDDDDDDRRRRRRRRRRRIIIIIIIIMMMMMMMMEEEEEEEEETTTTTTTFFFFFFFFFFFSSSSSSVVVVVVVFFFFFFFFFFFPPPPPPPSSSSSSPPPPPPPKKKKKKKKKVVVVVVVSSSSSSDDDDDDDDTTTTTTTVVVVVVVVVVVVVVEEEEEEEEEPPPPPPPYYYYYYYYYYYYNNNNNNNNAAAAATTTTTTTLLLLLLLLSSSSSSVVVVVVVHHHHHHHHHHQQQQQQQQQLLLLLLLLVVVVVVVEEEEEEEEENNNNNNNNAAAAADDDDDDDDEEEEEEEEEVVVVVVVQQQQQQQQQVVVVVVVIIIIIIIIDDDDDDDDNNNNNNNNEEEEEEEEEAAAAALLLLLLLLYYYYYYYYYYYYDDDDDDDDIIIIIIIICCCCCCFFFFFFFFFFFRRRRRRRRRRRTTTTTTTLLLLLLLLKKKKKKKKKLLLLLLLLTTTTTTTTTTTTTTPPPPPPPTTTTTTTYYYYYYYYYYYYGGGGDDDDDDDDLLLLLLLLNNNNNNNNHHHHHHHHHHLLLLLLLLVVVVVVVSSSSSSAAAAAAAAAAMMMMMMMMSSSSSSGGGGVVVVVVVTTTTTTTCCCCCCSSSSSSLLLLLLLLRRRRRRRRRRRFFFFFFFFFFFPPPPPPPGGGGQQQQQQQQQLLLLLLLLNNNNNNNNSSSSSSDDDDDDDDLLLLLLLLRRRRRRRRRRRKKKKKKKKKLLLLLLLLAAAAAVVVVVVVNNNNNNNNLLLLLLLLIIIIIIIIPPPPPPPFFFFFFFFFFFPPPPPPPRRRRRRRRRRRLLLLLLLLHHHHHHHHHHFFFFFFFFFFFFFFFFFFFFFFMMMMMMMMYYYYYYYYYYYYGGGGFFFFFFFFFFFAAAAAPPPPPPPLLLLLLLLTTTTTTTSSSSSSRRRRRRRRRRRGGGGSSSSSSQQQQQQQQQQQQQQQQQQYYYYYYYYYYYYRRRRRRRRRRRAAAAALLLLLLLLTTTTTTTVVVVVVVPPPPPPPEEEEEEEEELLLLLLLLTTTTTTTQQQQQQQQQQQQQQQQQQMMMMMMMMFFFFFFFFFFFDDDDDDDDAAAAAKKKKKKKKKNNNNNNNNMMMMMMMMMMMMMMMMCCCCCCTTTTTTTSSSSSSDDDDDDDDPPPPPPPRRRRRRRRRRRHHHHHHHHHHGGGGRRRRRRRRRRRYYYYYYYYYYYYLLLLLLLLTTTTTTTAAAAACCCCCCAAAAAMMMMMMMMFFFFFFFFFFFRRRRRRRRRRRGGGGRRRRRRRRRRRMMMMMMMMSSSSSSTTTTTTTKKKKKKKKKEEEEEEEEEVVVVVVVDDDDDDDDEEEEEEEEEQQQQQQQQQMMMMMMMMLLLLLLLLNNNNNNNNVVVVVVVQQQQQQQQQNNNNNNNNKKKKKKKKKNNNNNNNNSSSSSSSSSSSSYYYYYYYYYYYYFFFFFFFFFFFVVVVVVVEEEEEEEEEWWWWWWWWWWWWWWIIIIIIIIPPPPPPPHHHHHHHHHHNNNNNNNNTTTTTTTKKKKKKKKKSSSSSSSSSSSSVVVVVVVCCCCCCDDDDDDDDIIIIIIIIPPPPPPPPPPPPPPLLLLLLLLGGGGLLLLLLLLKKKKKKKKKMMMMMMMMAAAAAVVVVVVVTTTTTTTFFFFFFFFFFFVVVVVVVGGGGNNNNNNNNSSSSSSTTTTTTTAAAAAIIIIIIIIQQQQQQQQQEEEEEEEEEMMMMMMMMFFFFFFFFFFFKKKKKKKKKRRRRRRRRRRRVVVVVVVSSSSSSDDDDDDDDQQQQQQQQQFFFFFFFFFFFTTTTTTTAAAAAMMMMMMMMFFFFFFFFFFFRRRRRRRRRRRRRRRRRRRRRRKKKKKKKKKAAAAAFFFFFFFFFFFLLLLLLLLHHHHHHHHHHWWWWWWWWWWWWWWYYYYYYYYYYYYTTTTTTTGGGGEEEEEEEEEGGGGMMMMMMMMDDDDDDDDEEEEEEEEEMMMMMMMMEEEEEEEEEFFFFFFFFFFFTTTTTTTEEEEEEEEEAAAAAEEEEEEEEESSSSSSNNNNNNNNMMMMMMMMNNNNNNNNDDDDDDDDLLLLLLLLVVVVVVVSSSSSSEEEEEEEEEYYYYYYYYYYYYQQQQQQQQQQQQQQQQQQYYYYYYYYYYYYQQQQQQQQQDDDDDDDDAAAAATTTTTTTAAAAAEEEEEEEEEEEEEEEEEEEEEEEEEEEGGGGEEEEEEEEEFFFFFFFFFFFEEEEEEEEEEEEEEEEEEEEEEEEEEEEEEEEEEEEGGGGDDDDDDDDVVVVVVVEEEEEEEEEAAAAAA

SEQ ID NO: 240 - protein, 3488 aa, Plasmodium falciparum
MMMMMMMMRRRRRRRRRRREEEEEEEEEIIIIIIIIVVVVVVVHHHHHHHHHHIIIIIIIIQQQQQQQQQAAAAAGGGGQQQQQQQQQCCCCCCGGGGNNNNNNNNQQQQQQQQQIIIIIIIIGGGGAAAAAKKKKKKKKKFFFFFFFFFFFWWWWWWWWWWWWWWEEEEEEEEEVVVVVVVIIIIIIIISSSSSSDDDDDDDDEEEEEEEEEHHHHHHHHHHGGGGIIIIIIIIDDDDDDDDPPPPPPPSSSSSSGGGGTTTTTTTYYYYYYYYYYYYCCCCCCGGGGDDDDDDDDSSSSSSDDDDDDDDLLLLLLLLQQQQQQQQQLLLLLLLLEEEEEEEEERRRRRRRRRRRVVVVVVVDDDDDDDDVVVVVVVFFFFFFFFFFFYYYYYYYYYYYYNNNNNNNNEEEEEEEEEAAAAATTTTTTTGGGGGGGGRRRRRRRRRRRYYYYYYYYYYYYVVVVVVVPPPPPPPRRRRRRRRRRRAAAAAIIIIIIIILLLLLLLLMMMMMMMMDDDDDDDDLLLLLLLLEEEEEEEEEPPPPPPPGGGGTTTTTTTMMMMMMMMDDDDDDDDSSSSSSVVVVVVVRRRRRRRRRRRAAAAAGGGGPPPPPPPFFFFFFFFFFFGGGGQQQQQQQQQLLLLLLLLFFFFFFFFFFFRRRRRRRRRRRPPPPPPPDDDDDDDDNNNNNNNNFFFFFFFFFFFVVVVVVVFFFFFFFFFFFGGGGQQQQQQQQQTTTTTTTGGGGAAAAAGGGGNNNNNNNNNNNNNNNNWWWWWWWWWWWWWWAAAAAKKKKKKKKKGGGGHHHHHHHHHHYYYYYYYYYYYYTTTTTTTEEEEEEEEEGGGGAAAAAEEEEEEEEELLLLLLLLIIIIIIIIDDDDDDDDAAAAAVVVVVVVLLLLLLLLDDDDDDDDVVVVVVVVVVVVVVRRRRRRRRRRRKKKKKKKKKEEEEEEEEEAAAAAEEEEEEEEEGGGGCCCCCCDDDDDDDDCCCCCCLLLLLLLLQQQQQQQQQGGGGFFFFFFFFFFFQQQQQQQQQIIIIIIIITTTTTTTHHHHHHHHHHSSSSSSLLLLLLLLGGGGGGGGGGGGTTTTTTTGGGGSSSSSSGGGGMMMMMMMMGGGGTTTTTTTLLLLLLLLLLLLLLLLIIIIIIIISSSSSSKKKKKKKKKIIIIIIIIRRRRRRRRRRREEEEEEEEEEEEEEEEEEYYYYYYYYYYYYPPPPPPPDDDDDDDDRRRRRRRRRRRIIIIIIIIMMMMMMMMEEEEEEEEETTTTTTTFFFFFFFFFFFSSSSSSVVVVVVVFFFFFFFFFFFPPPPPPPSSSSSSPPPPPPPKKKKKKKKKVVVVVVVSSSSSSDDDDDDDDTTTTTTTVVVVVVVVVVVVVVEEEEEEEEEPPPPPPPYYYYYYYYYYYYNNNNNNNNAAAAATTTTTTTLLLLLLLLSSSSSSVVVVVVVHHHHHHHHHHQQQQQQQQQLLLLLLLLVVVVVVVEEEEEEEEENNNNNNNNAAAAADDDDDDDDEEEEEEEEEVVVVVVVQQQQQQQQQVVVVVVVIIIIIIIIDDDDDDDDNNNNNNNNEEEEEEEEEAAAAALLLLLLLLYYYYYYYYYYYYDDDDDDDDIIIIIIIICCCCCCFFFFFFFFFFFRRRRRRRRRRRTTTTTTTLLLLLLLLKKKKKKKKKLLLLLLLLTTTTTTTTTTTTTTPPPPPPPTTTTTTTYYYYYYYYYYYYGGGGDDDDDDDDLLLLLLLLNNNNNNNNHHHHHHHHHHLLLLLLLLVVVVVVVSSSSSSAAAAAAAAAAMMMMMMMMSSSSSSGGGGVVVVVVVTTTTTTTCCCCCCSSSSSSLLLLLLLLRRRRRRRRRRRFFFFFFFFFFFPPPPPPPGGGGQQQQQQQQQLLLLLLLLNNNNNNNNSSSSSSDDDDDDDDLLLLLLLLRRRRRRRRRRRKKKKKKKKKLLLLLLLLAAAAAVVVVVVVNNNNNNNNLLLLLLLLIIIIIIIIPPPPPPPFFFFFFFFFFFPPPPPPPRRRRRRRRRRRLLLLLLLLHHHHHHHHHHFFFFFFFFFFFFFFFFFFFFFFMMMMMMMMIIIIIIIIGGGGFFFFFFFFFFFAAAAAPPPPPPPLLLLLLLLTTTTTTTSSSSSSRRRRRRRRRRRGGGGSSSSSSQQQQQQQQQQQQQQQQQQYYYYYYYYYYYYRRRRRRRRRRRAAAAALLLLLLLLTTTTTTTVVVVVVVPPPPPPPEEEEEEEEELLLLLLLLTTTTTTTQQQQQQQQQQQQQQQQQQMMMMMMMMFFFFFFFFFFFDDDDDDDDAAAAAKKKKKKKKKNNNNNNNNMMMMMMMMMMMMMMMMCCCCCCAAAAASSSSSSDDDDDDDDPPPPPPPRRRRRRRRRRRHHHHHHHHHHGGGGRRRRRRRRRRRYYYYYYYYYYYYLLLLLLLLTTTTTTTAAAAACCCCCCAAAAAMMMMMMMMFFFFFFFFFFFRRRRRRRRRRRGGGGRRRRRRRRRRRMMMMMMMMSSSSSSTTTTTTTKKKKKKKKKEEEEEEEEEVVVVVVVDDDDDDDDEEEEEEEEEQQQQQQQQQMMMMMMMMLLLLLLLLNNNNNNNNVVVVVVVQQQQQQQQQNNNNNNNNKKKKKKKKKNNNNNNNNSSSSSSSSSSSSYYYYYYYYYYYYFFFFFFFFFFFVVVVVVVEEEEEEEEEWWWWWWWWWWWWWWIIIIIIIIPPPPPPPHHHHHHHHHHNNNNNNNNTTTTTTTKKKKKKKKKSSSSSSSSSSSSVVVVVVVCCCCCCDDDDDDDDIIIIIIIIPPPPPPPPPPPPPPKKKKKKKKKGGGGLLLLLLLLKKKKKKKKKMMMMMMMMAAAAAVVVVVVVTTTTTTTFFFFFFFFFFFVVVVVVVGGGGNNNNNNNNSSSSSSTTTTTTTAAAAAIIIIIIIIQQQQQQQQQEEEEEEEEEMMMMMMMMFFFFFFFFFFFKKKKKKKKKRRRRRRRRRRRVVVVVVVSSSSSSDDDDDDDDQQQQQQQQQFFFFFFFFFFFTTTTTTTAAAAAMMMMMMMMFFFFFFFFFFFRRRRRRRRRRRRRRRRRRRRRRKKKKKKKKKAAAAAFFFFFFFFFFFLLLLLLLLHHHHHHHHHHWWWWWWWWWWWWWWYYYYYYYYYYYYTTTTTTTGGGGEEEEEEEEEGGGGMMMMMMMMDDDDDDDDEEEEEEEEEMMMMMMMMEEEEEEEEEFFFFFFFFFFFTTTTTTTEEEEEEEEEAAAAAEEEEEEEEESSSSSSNNNNNNNNMMMMMMMMNNNNNNNNDDDDDDDDLLLLLLLLVVVVVVVSSSSSSEEEEEEEEEYYYYYYYYYYYYQQQQQQQQQQQQQQQQQQYYYYYYYYYYYYQQQQQQQQQDDDDDDDDAAAAATTTTTTTAAAAAEEEEEEEEEEEEEEEEEEEEEEEEEEEGGGGEEEEEEEEEFFFFFFFFFFFEEEEEEEEEEEEEEEEEEEEEEEEEEEEEEEEEEEEGGGGDDDDDDDDVVVVVVVEEEEEEEEEAAAAAA

SEQ ID NO: 241 - protein, 3510 aa, Pleurotus sajor-caju
MMMMMMMMRRRRRRRRRRREEEEEEEEEIIIIIIIIVVVVVVVHHHHHHHHHHLLLLLLLLQQQQQQQQQTTTTTTTGGGGQQQQQQQQQCCCCCCRRRRRRRRRRRNNNNNNNNQQQQQQQQQIIIIIIIIGGGGAAAAAKKKKKKKKKFFFFFFFFFFFWWWWWWWWWWWWWWEEEEEEEEEVVVVVVVVVVVVVVSSSSSSDDDDDDDDEEEEEEEEEHHHHHHHHHHGGGGIIIIIIIIEEEEEEEEEPPPPPPPDDDDDDDDGGGGLLLLLLLLYYYYYYYYYYYYKKKKKKKKKGGGGNNNNNNNNNNNNNNNNDDDDDDDDLLLLLLLLQQQQQQQQQLLLLLLLLEEEEEEEEERRRRRRRRRRRIIIIIIIISSSSSSVVVVVVVYYYYYYYYYYYYYYYYYYYYYYYYNNNNNNNNEEEEEEEEEVVVVVVVGGGGAAAAANNNNNNNNKKKKKKKKKYYYYYYYYYYYYVVVVVVVPPPPPPPRRRRRRRRRRRAAAAAVVVVVVVLLLLLLLLVVVVVVVDDDDDDDDLLLLLLLLEEEEEEEEEPPPPPPPGGGGTTTTTTTMMMMMMMMDDDDDDDDSSSSSSVVVVVVVRRRRRRRRRRRSSSSSSGGGGPPPPPPPLLLLLLLLGGGGSSSSSSLLLLLLLLFFFFFFFFFFFRRRRRRRRRRRPPPPPPPDDDDDDDDNNNNNNNNFFFFFFFFFFFVVVVVVVFFFFFFFFFFFGGGGQQQQQQQQQSSSSSSGGGGGGGGGGGGNNNNNNNNNNNNNNNNWWWWWWWWWWWWWWAAAAAKKKKKKKKKGGGGHHHHHHHHHHYYYYYYYYYYYYTTTTTTTEEEEEEEEEGGGGAAAAAEEEEEEEEELLLLLLLLVVVVVVVDDDDDDDDAAAAAVVVVVVVLLLLLLLLDDDDDDDDVVVVVVVVVVVVVVRRRRRRRRRRRKKKKKKKKKEEEEEEEEEAAAAAEEEEEEEEEGGGGTTTTTTTDDDDDDDDCCCCCCLLLLLLLLQQQQQQQQQGGGGFFFFFFFFFFFQQQQQQQQQIIIIIIIITTTTTTTHHHHHHHHHHSSSSSSLLLLLLLLGGGGGGGGGGGGTTTTTTTGGGGAAAAAGGGGMMMMMMMMGGGGTTTTTTTLLLLLLLLLLLLLLLLIIIIIIIISSSSSSKKKKKKKKKIIIIIIIIRRRRRRRRRRREEEEEEEEEEEEEEEEEEYYYYYYYYYYYYPPPPPPPDDDDDDDDRRRRRRRRRRRMMMMMMMMMMMMMMMMCCCCCCTTTTTTTYYYYYYYYYYYYSSSSSSVVVVVVVVVVVVVVPPPPPPPSSSSSSPPPPPPPKKKKKKKKKVVVVVVVSSSSSSDDDDDDDDTTTTTTTVVVVVVVVVVVVVVEEEEEEEEEPPPPPPPYYYYYYYYYYYYNNNNNNNNAAAAATTTTTTTLLLLLLLLSSSSSSVVVVVVVHHHHHHHHHHQQQQQQQQQLLLLLLLLVVVVVVVEEEEEEEEENNNNNNNNSSSSSSDDDDDDDDEEEEEEEEETTTTTTTFFFFFFFFFFFCCCCCCIIIIIIIIDDDDDDDDNNNNNNNNEEEEEEEEEAAAAALLLLLLLLYYYYYYYYYYYYDDDDDDDDIIIIIIIICCCCCCFFFFFFFFFFFRRRRRRRRRRRTTTTTTTLLLLLLLLKKKKKKKKKLLLLLLLLTTTTTTTTTTTTTTPPPPPPPTTTTTTTYYYYYYYYYYYYGGGGDDDDDDDDLLLLLLLLNNNNNNNNHHHHHHHHHHLLLLLLLLIIIIIIIISSSSSSIIIIIIIIVVVVVVVMMMMMMMMSSSSSSGGGGIIIIIIIITTTTTTTTTTTTTTCCCCCCLLLLLLLLRRRRRRRRRRRFFFFFFFFFFFPPPPPPPGGGGQQQQQQQQQLLLLLLLLNNNNNNNNSSSSSSDDDDDDDDLLLLLLLLRRRRRRRRRRRKKKKKKKKKLLLLLLLLAAAAAVVVVVVVNNNNNNNNMMMMMMMMVVVVVVVPPPPPPPFFFFFFFFFFFPPPPPPPRRRRRRRRRRRLLLLLLLLHHHHHHHHHHFFFFFFFFFFFFFFFFFFFFFFMMMMMMMMPPPPPPPGGGGVVVVVVVCCCCCCPPPPPPPLLLLLLLLTTTTTTTAAAAARRRRRRRRRRRGGGGSSSSSSQQQQQQQQQQQQQQQQQQYYYYYYYYYYYYRRRRRRRRRRRAAAAAVVVVVVVTTTTTTTVVVVVVVPPPPPPPEEEEEEEEELLLLLLLLTTTTTTTQQQQQQQQQQQQQQQQQQMMMMMMMMFFFFFFFFFFFDDDDDDDDAAAAAKKKKKKKKKNNNNNNNNMMMMMMMMMMMMMMMMAAAAAAAAAASSSSSSDDDDDDDDPPPPPPPRRRRRRRRRRRHHHHHHHHHHGGGGRRRRRRRRRRRYYYYYYYYYYYYLLLLLLLLTTTTTTTVVVVVVVAAAAAAAAAAVVVVVVVFFFFFFFFFFFRRRRRRRRRRRGGGGKKKKKKKKKVVVVVVVSSSSSSMMMMMMMMKKKKKKKKKEEEEEEEEEVVVVVVVEEEEEEEEEEEEEEEEEEQQQQQQQQQMMMMMMMMQQQQQQQQQNNNNNNNNVVVVVVVQQQQQQQQQNNNNNNNNKKKKKKKKKNNNNNNNNSSSSSSAAAAAYYYYYYYYYYYYFFFFFFFFFFFVVVVVVVEEEEEEEEEWWWWWWWWWWWWWWIIIIIIIIPPPPPPPNNNNNNNNNNNNNNNNVVVVVVVLLLLLLLLTTTTTTTAAAAAQQQQQQQQQCCCCCCDDDDDDDDIIIIIIIIPPPPPPPPPPPPPPRRRRRRRRRRRGGGGCCCCCCKKKKKKKKKMMMMMMMMAAAAAVVVVVVVTTTTTTTFFFFFFFFFFFLLLLLLLLGGGGNNNNNNNNSSSSSSTTTTTTTAAAAAIIIIIIIIQQQQQQQQQEEEEEEEEELLLLLLLLFFFFFFFFFFFKKKKKKKKKRRRRRRRRRRRVVVVVVVNNNNNNNNDDDDDDDDQQQQQQQQQFFFFFFFFFFFAAAAAAAAAAMMMMMMMMFFFFFFFFFFFKKKKKKKKKRRRRRRRRRRRKKKKKKKKKAAAAAFFFFFFFFFFFLLLLLLLLHHHHHHHHHHWWWWWWWWWWWWWWYYYYYYYYYYYYTTTTTTTQQQQQQQQQEEEEEEEEEGGGGMMMMMMMMDDDDDDDDEEEEEEEEEMMMMMMMMEEEEEEEEEFFFFFFFFFFFTTTTTTTEEEEEEEEEAAAAAEEEEEEEEESSSSSSNNNNNNNNMMMMMMMMQQQQQQQQQDDDDDDDDLLLLLLLLVVVVVVVAAAAAEEEEEEEEEYYYYYYYYYYYYQQQQQQQQQQQQQQQQQQYYYYYYYYYYYYQQQQQQQQQDDDDDDDDAAAAATTTTTTTAAAAADDDDDDDDEEEEEEEEEEEEEEEEEEEEEEEEEEEGGGGEEEEEEEEEYYYYYYYYYYYYEEEEEEEEEEEEEEEEEEEEEEEEEEEPPPPPPPAAAAAEEEEEEEEEEEEEEEEEEEEEEEEEEEQQQQQQQQQQ

SEQ ID NO: 242 - protein, 3445 aa, Pneumocystis carinii
MMMMMMMMRRRRRRRRRRREEEEEEEEEIIIIIIIIVVVVVVVHHHHHHHHHHLLLLLLLLQQQQQQQQQTTTTTTTGGGGQQQQQQQQQCCCCCCGGGGNNNNNNNNQQQQQQQQQIIIIIIIIGGGGAAAAASSSSSSFFFFFFFFFFFWWWWWWWWWWWWWWSSSSSSTTTTTTTIIIIIIIISSSSSSGGGGEEEEEEEEEHHHHHHHHHHGGGGLLLLLLLLDDDDDDDDSSSSSSTTTTTTTGGGGVVVVVVVYYYYYYYYYYYYQQQQQQQQQGGGGTTTTTTTSSSSSSDDDDDDDDLLLLLLLLQQQQQQQQQLLLLLLLLEEEEEEEEERRRRRRRRRRRMMMMMMMMNNNNNNNNVVVVVVVYYYYYYYYYYYYFFFFFFFFFFFNNNNNNNNEEEEEEEEEAAAAASSSSSSGGGGGGGGKKKKKKKKKYYYYYYYYYYYYVVVVVVVPPPPPPPRRRRRRRRRRRSSSSSSIIIIIIIILLLLLLLLIIIIIIIIDDDDDDDDLLLLLLLLEEEEEEEEEPPPPPPPGGGGTTTTTTTMMMMMMMMDDDDDDDDAAAAAVVVVVVVRRRRRRRRRRRSSSSSSGGGGPPPPPPPFFFFFFFFFFFGGGGNNNNNNNNLLLLLLLLFFFFFFFFFFFRRRRRRRRRRRPPPPPPPDDDDDDDDNNNNNNNNFFFFFFFFFFFVVVVVVVFFFFFFFFFFFGGGGQQQQQQQQQSSSSSSGGGGAAAAAGGGGNNNNNNNNNNNNNNNNWWWWWWWWWWWWWWAAAAAKKKKKKKKKGGGGHHHHHHHHHHYYYYYYYYYYYYTTTTTTTEEEEEEEEEGGGGAAAAAEEEEEEEEELLLLLLLLVVVVVVVDDDDDDDDSSSSSSVVVVVVVLLLLLLLLDDDDDDDDVVVVVVVVVVVVVVRRRRRRRRRRRRRRRRRRRRRREEEEEEEEEAAAAAEEEEEEEEEAAAAACCCCCCDDDDDDDDCCCCCCLLLLLLLLQQQQQQQQQGGGGFFFFFFFFFFFQQQQQQQQQIIIIIIIITTTTTTTHHHHHHHHHHSSSSSSLLLLLLLLGGGGGGGGGGGGTTTTTTTGGGGAAAAAGGGGMMMMMMMMGGGGTTTTTTTLLLLLLLLLLLLLLLLIIIIIIIISSSSSSKKKKKKKKKIIIIIIIIRRRRRRRRRRREEEEEEEEEEEEEEEEEEYYYYYYYYYYYYPPPPPPPDDDDDDDDRRRRRRRRRRRMMMMMMMMMMMMMMMMAAAAATTTTTTTFFFFFFFFFFFSSSSSSVVVVVVVVVVVVVVPPPPPPPSSSSSSPPPPPPPKKKKKKKKKVVVVVVVSSSSSSDDDDDDDDTTTTTTTVVVVVVVVVVVVVVEEEEEEEEEPPPPPPPYYYYYYYYYYYYNNNNNNNNAAAAATTTTTTTLLLLLLLLSSSSSSVVVVVVVHHHHHHHHHHQQQQQQQQQLLLLLLLLVVVVVVVEEEEEEEEENNNNNNNNSSSSSSDDDDDDDDEEEEEEEEETTTTTTTFFFFFFFFFFFCCCCCCIIIIIIIIDDDDDDDDNNNNNNNNEEEEEEEEEAAAAALLLLLLLLYYYYYYYYYYYYDDDDDDDDIIIIIIIICCCCCCMMMMMMMMRRRRRRRRRRRTTTTTTTLLLLLLLLKKKKKKKKKLLLLLLLLPPPPPPPDDDDDDDDPPPPPPPGGGGYYYYYYYYYYYYGGGGDDDDDDDDLLLLLLLLNNNNNNNNHHHHHHHHHHLLLLLLLLVVVVVVVSSSSSSAAAAAVVVVVVVMMMMMMMMSSSSSSGGGGIIIIIIIITTTTTTTTTTTTTTCCCCCCLLLLLLLLRRRRRRRRRRRFFFFFFFFFFFPPPPPPPGGGGQQQQQQQQQLLLLLLLLNNNNNNNNSSSSSSDDDDDDDDLLLLLLLLRRRRRRRRRRRKKKKKKKKKLLLLLLLLAAAAAVVVVVVVNNNNNNNNMMMMMMMMVVVVVVVPPPPPPPFFFFFFFFFFFPPPPPPPRRRRRRRRRRRLLLLLLLLHHHHHHHHHHFFFFFFFFFFFFFFFFFFFFFFIIIIIIIIVVVVVVVGGGGFFFFFFFFFFFAAAAAPPPPPPPLLLLLLLLTTTTTTTSSSSSSKKKKKKKKKGGGGSSSSSSHHHHHHHHHHSSSSSSFFFFFFFFFFFRRRRRRRRRRRSSSSSSLLLLLLLLTTTTTTTVVVVVVVPPPPPPPEEEEEEEEELLLLLLLLTTTTTTTQQQQQQQQQQQQQQQQQQMMMMMMMMFFFFFFFFFFFDDDDDDDDAAAAAKKKKKKKKKNNNNNNNNMMMMMMMMMMMMMMMMAAAAAAAAAASSSSSSDDDDDDDDPPPPPPPRRRRRRRRRRRHHHHHHHHHHGGGGRRRRRRRRRRRYYYYYYYYYYYYLLLLLLLLTTTTTTTVVVVVVVAAAAAAAAAAIIIIIIIIFFFFFFFFFFFRRRRRRRRRRRGGGGRRRRRRRRRRRVVVVVVVSSSSSSMMMMMMMMKKKKKKKKKEEEEEEEEEVVVVVVVEEEEEEEEEDDDDDDDDQQQQQQQQQMMMMMMMMHHHHHHHHHHSSSSSSVVVVVVVQQQQQQQQQQQQQQQQQQKKKKKKKKKNNNNNNNNSSSSSSSSSSSSYYYYYYYYYYYYFFFFFFFFFFFVVVVVVVEEEEEEEEEWWWWWWWWWWWWWWIIIIIIIIPPPPPPPNNNNNNNNNNNNNNNNVVVVVVVQQQQQQQQQTTTTTTTAAAAALLLLLLLLCCCCCCSSSSSSIIIIIIIIPPPPPPPPPPPPPPRRRRRRRRRRRGGGGLLLLLLLLKKKKKKKKKMMMMMMMMSSSSSSSSSSSSTTTTTTTFFFFFFFFFFFIIIIIIIIGGGGNNNNNNNNSSSSSSTTTTTTTSSSSSSIIIIIIIIQQQQQQQQQEEEEEEEEELLLLLLLLFFFFFFFFFFFKKKKKKKKKRRRRRRRRRRRVVVVVVVGGGGDDDDDDDDQQQQQQQQQFFFFFFFFFFFSSSSSSAAAAAMMMMMMMMFFFFFFFFFFFRRRRRRRRRRRRRRRRRRRRRRKKKKKKKKKAAAAAFFFFFFFFFFFLLLLLLLLHHHHHHHHHHWWWWWWWWWWWWWWYYYYYYYYYYYYTTTTTTTGGGGEEEEEEEEEGGGGMMMMMMMMDDDDDDDDEEEEEEEEEMMMMMMMMEEEEEEEEEFFFFFFFFFFFTTTTTTTEEEEEEEEEAAAAAEEEEEEEEESSSSSSNNNNNNNNMMMMMMMMNNNNNNNNDDDDDDDDLLLLLLLLVVVVVVVSSSSSSEEEEEEEEEYYYYYYYYYYYYQQQQQQQQQQQQQQQQQQYYYYYYYYYYYYEEEEEEEEEIIIIIIIIAAAAAGGGGVVVVVVVDDDDDDDDEEEEEEEEEEEEEEEEEEVVVVVVVEEEEEEEEELLLLLLLLDDDDDDDDDDDDDDDDEEEEEEEEEIIIIIIIIEEEEEEEEETTTTTTTT

SEQ ID NO: 243 - protein, 3472 aa, Polytomella agilis
MMMMMMMMRRRRRRRRRRREEEEEEEEEIIIIIIIIVVVVVVVHHHHHHHHHHIIIIIIIIQQQQQQQQQGGGGGGGGQQQQQQQQQCCCCCCGGGGNNNNNNNNQQQQQQQQQIIIIIIIIGGGGAAAAAKKKKKKKKKFFFFFFFFFFFWWWWWWWWWWWWWWEEEEEEEEEVVVVVVVVVVVVVVSSSSSSDDDDDDDDEEEEEEEEEHHHHHHHHHHGGGGIIIIIIIIDDDDDDDDPPPPPPPTTTTTTTGGGGTTTTTTTAAAAALLLLLLLLGGGGDDDDDDDDSSSSSSDDDDDDDDLLLLLLLLQQQQQQQQQLLLLLLLLEEEEEEEEERRRRRRRRRRRIIIIIIIINNNNNNNNVVVVVVVYYYYYYYYYYYYFFFFFFFFFFFNNNNNNNNEEEEEEEEEAAAAATTTTTTTGGGGSSSSSSRRRRRRRRRRRYYYYYYYYYYYYVVVVVVVPPPPPPPRRRRRRRRRRRAAAAAIIIIIIIILLLLLLLLMMMMMMMMDDDDDDDDLLLLLLLLEEEEEEEEEPPPPPPPGGGGTTTTTTTMMMMMMMMDDDDDDDDSSSSSSVVVVVVVRRRRRRRRRRRSSSSSSGGGGPPPPPPPYYYYYYYYYYYYGGGGQQQQQQQQQIIIIIIIIFFFFFFFFFFFRRRRRRRRRRRPPPPPPPDDDDDDDDNNNNNNNNFFFFFFFFFFFVVVVVVVFFFFFFFFFFFGGGGQQQQQQQQQTTTTTTTGGGGAAAAAGGGGNNNNNNNNNNNNNNNNWWWWWWWWWWWWWWAAAAAKKKKKKKKKGGGGHHHHHHHHHHYYYYYYYYYYYYTTTTTTTEEEEEEEEEGGGGAAAAAEEEEEEEEELLLLLLLLIIIIIIIIDDDDDDDDSSSSSSVVVVVVVLLLLLLLLDDDDDDDDVVVVVVVVVVVVVVRRRRRRRRRRRKKKKKKKKKEEEEEEEEEAAAAAEEEEEEEEESSSSSSCCCCCCDDDDDDDDCCCCCCLLLLLLLLQQQQQQQQQGGGGFFFFFFFFFFFQQQQQQQQQVVVVVVVCCCCCCHHHHHHHHHHSSSSSSLLLLLLLLGGGGGGGGGGGGTTTTTTTGGGGSSSSSSGGGGMMMMMMMMGGGGTTTTTTTLLLLLLLLLLLLLLLLIIIIIIIISSSSSSKKKKKKKKKIIIIIIIIRRRRRRRRRRREEEEEEEEEEEEEEEEEEYYYYYYYYYYYYPPPPPPPDDDDDDDDRRRRRRRRRRRMMMMMMMMMMMMMMMMLLLLLLLLTTTTTTTFFFFFFFFFFFSSSSSSVVVVVVVVVVVVVVPPPPPPPSSSSSSPPPPPPPKKKKKKKKKVVVVVVVSSSSSSDDDDDDDDTTTTTTTVVVVVVVVVVVVVVEEEEEEEEEPPPPPPPYYYYYYYYYYYYNNNNNNNNAAAAATTTTTTTLLLLLLLLSSSSSSVVVVVVVHHHHHHHHHHQQQQQQQQQLLLLLLLLVVVVVVVEEEEEEEEENNNNNNNNAAAAADDDDDDDDEEEEEEEEECCCCCCMMMMMMMMVVVVVVVLLLLLLLLDDDDDDDDNNNNNNNNEEEEEEEEEAAAAALLLLLLLLYYYYYYYYYYYYDDDDDDDDIIIIIIIICCCCCCFFFFFFFFFFFRRRRRRRRRRRTTTTTTTLLLLLLLLKKKKKKKKKLLLLLLLLTTTTTTTTTTTTTTPPPPPPPTTTTTTTFFFFFFFFFFFGGGGDDDDDDDDLLLLLLLLNNNNNNNNHHHHHHHHHHLLLLLLLLIIIIIIIISSSSSSAAAAAVVVVVVVMMMMMMMMSSSSSSGGGGIIIIIIIITTTTTTTCCCCCCCCCCCCLLLLLLLLRRRRRRRRRRRFFFFFFFFFFFPPPPPPPGGGGQQQQQQQQQLLLLLLLLNNNNNNNNAAAAADDDDDDDDLLLLLLLLRRRRRRRRRRRKKKKKKKKKLLLLLLLLAAAAAVVVVVVVNNNNNNNNLLLLLLLLIIIIIIIIPPPPPPPFFFFFFFFFFFPPPPPPPRRRRRRRRRRRLLLLLLLLHHHHHHHHHHFFFFFFFFFFFFFFFFFFFFFFMMMMMMMMVVVVVVVGGGGFFFFFFFFFFFTTTTTTTPPPPPPPLLLLLLLLTTTTTTTSSSSSSRRRRRRRRRRRGGGGSSSSSSQQQQQQQQQQQQQQQQQQYYYYYYYYYYYYRRRRRRRRRRRAAAAALLLLLLLLTTTTTTTVVVVVVVPPPPPPPEEEEEEEEELLLLLLLLTTTTTTTQQQQQQQQQQQQQQQQQQMMMMMMMMWWWWWWWWWWWWWWDDDDDDDDAAAAAKKKKKKKKKNNNNNNNNMMMMMMMMMMMMMMMMCCCCCCAAAAAAAAAADDDDDDDDPPPPPPPRRRRRRRRRRRHHHHHHHHHHGGGGRRRRRRRRRRRYYYYYYYYYYYYLLLLLLLLTTTTTTTAAAAASSSSSSAAAAALLLLLLLLFFFFFFFFFFFRRRRRRRRRRRGGGGRRRRRRRRRRRMMMMMMMMSSSSSSTTTTTTTKKKKKKKKKEEEEEEEEEVVVVVVVDDDDDDDDEEEEEEEEEQQQQQQQQQMMMMMMMMLLLLLLLLNNNNNNNNVVVVVVVQQQQQQQQQNNNNNNNNKKKKKKKKKNNNNNNNNSSSSSSSSSSSSYYYYYYYYYYYYFFFFFFFFFFFVVVVVVVEEEEEEEEEWWWWWWWWWWWWWWIIIIIIIIPPPPPPPNNNNNNNNNNNNNNNNVVVVVVVKKKKKKKKKSSSSSSSSSSSSVVVVVVVCCCCCCDDDDDDDDIIIIIIIIPPPPPPPPPPPPPPKKKKKKKKKGGGGLLLLLLLLKKKKKKKKKMMMMMMMMSSSSSSAAAAATTTTTTTFFFFFFFFFFFIIIIIIIIGGGGNNNNNNNNSSSSSSTTTTTTTAAAAAIIIIIIIIQQQQQQQQQEEEEEEEEEMMMMMMMMFFFFFFFFFFFKKKKKKKKKRRRRRRRRRRRVVVVVVVSSSSSSEEEEEEEEEQQQQQQQQQFFFFFFFFFFFTTTTTTTAAAAAMMMMMMMMFFFFFFFFFFFRRRRRRRRRRRRRRRRRRRRRRKKKKKKKKKAAAAAFFFFFFFFFFFLLLLLLLLHHHHHHHHHHWWWWWWWWWWWWWWYYYYYYYYYYYYTTTTTTTGGGGEEEEEEEEEGGGGMMMMMMMMDDDDDDDDEEEEEEEEEMMMMMMMMEEEEEEEEEFFFFFFFFFFFTTTTTTTEEEEEEEEEAAAAAEEEEEEEEESSSSSSNNNNNNNNMMMMMMMMNNNNNNNNDDDDDDDDLLLLLLLLVVVVVVVSSSSSSEEEEEEEEEYYYYYYYYYYYYQQQQQQQQQQQQQQQQQQYYYYYYYYYYYYQQQQQQQQQDDDDDDDDAAAAASSSSSSAAAAAEEEEEEEEEEEEEEEEEEEEEEEEEEEGGGGEEEEEEEEEFFFFFFFFFFFGGGGEEEEEEEEEEEEEEEEEEEEEEEEEEEEEEEEEEEEEEEEEEEEENNNNNNNNN

SEQ ID NO: 244 - protein, 3490 aa, Pseudopleuronectes americanus
MMMMMMMMRRRRRRRRRRREEEEEEEEEIIIIIIIILLLLLLLLHHHHHHHHHHLLLLLLLLQQQQQQQQQAAAAAGGGGQQQQQQQQQCCCCCCGGGGNNNNNNNNQQQQQQQQQIIIIIIIIGGGGAAAAAKKKKKKKKKFFFFFFFFFFFWWWWWWWWWWWWWWEEEEEEEEEVVVVVVVIIIIIIIISSSSSSDDDDDDDDEEEEEEEEEHHHHHHHHHHGGGGIIIIIIIIDDDDDDDDPPPPPPPSSSSSSGGGGTTTTTTTYYYYYYYYYYYYHHHHHHHHHHGGGGDDDDDDDDNNNNNNNNEEEEEEEEELLLLLLLLQQQQQQQQQLLLLLLLLEEEEEEEEERRRRRRRRRRRIIIIIIIINNNNNNNNVVVVVVVYYYYYYYYYYYYYYYYYYYYYYYYNNNNNNNNEEEEEEEEEAAAAATTTTTTTGGGGGGGGKKKKKKKKKYYYYYYYYYYYYVVVVVVVPPPPPPPRRRRRRRRRRRAAAAAVVVVVVVLLLLLLLLVVVVVVVDDDDDDDDLLLLLLLLEEEEEEEEEPPPPPPPGGGGTTTTTTTMMMMMMMMDDDDDDDDSSSSSSVVVVVVVRRRRRRRRRRRSSSSSSGGGGAAAAAFFFFFFFFFFFGGGGQQQQQQQQQIIIIIIIIFFFFFFFFFFFRRRRRRRRRRRPPPPPPPDDDDDDDDNNNNNNNNFFFFFFFFFFFVVVVVVVFFFFFFFFFFFGGGGQQQQQQQQQSSSSSSGGGGAAAAAGGGGNNNNNNNNNNNNNNNNWWWWWWWWWWWWWWAAAAAKKKKKKKKKGGGGHHHHHHHHHHYYYYYYYYYYYYTTTTTTTEEEEEEEEEGGGGAAAAAEEEEEEEEELLLLLLLLVVVVVVVDDDDDDDDSSSSSSVVVVVVVLLLLLLLLDDDDDDDDVVVVVVVVVVVVVVRRRRRRRRRRRKKKKKKKKKEEEEEEEEEAAAAAEEEEEEEEESSSSSSCCCCCCDDDDDDDDCCCCCCLLLLLLLLQQQQQQQQQGGGGFFFFFFFFFFFQQQQQQQQQLLLLLLLLTTTTTTTHHHHHHHHHHSSSSSSLLLLLLLLGGGGGGGGGGGGTTTTTTTGGGGSSSSSSGGGGMMMMMMMMGGGGTTTTTTTLLLLLLLLLLLLLLLLIIIIIIIISSSSSSKKKKKKKKKIIIIIIIIRRRRRRRRRRREEEEEEEEEEEEEEEEEEYYYYYYYYYYYYPPPPPPPDDDDDDDDRRRRRRRRRRRIIIIIIIIMMMMMMMMNNNNNNNNTTTTTTTFFFFFFFFFFFSSSSSSVVVVVVVVVVVVVVPPPPPPPSSSSSSPPPPPPPKKKKKKKKKVVVVVVVSSSSSSDDDDDDDDTTTTTTTVVVVVVVVVVVVVVEEEEEEEEEPPPPPPPYYYYYYYYYYYYNNNNNNNNAAAAATTTTTTTLLLLLLLLSSSSSSVVVVVVVHHHHHHHHHHQQQQQQQQQLLLLLLLLVVVVVVVEEEEEEEEENNNNNNNNTTTTTTTDDDDDDDDEEEEEEEEETTTTTTTYYYYYYYYYYYYCCCCCCIIIIIIIIDDDDDDDDNNNNNNNNEEEEEEEEEAAAAALLLLLLLLYYYYYYYYYYYYDDDDDDDDIIIIIIIICCCCCCFFFFFFFFFFFRRRRRRRRRRRTTTTTTTLLLLLLLLKKKKKKKKKLLLLLLLLTTTTTTTTTTTTTTPPPPPPPTTTTTTTYYYYYYYYYYYYGGGGDDDDDDDDLLLLLLLLNNNNNNNNHHHHHHHHHHLLLLLLLLVVVVVVVSSSSSSAAAAATTTTTTTMMMMMMMMSSSSSSGGGGVVVVVVVTTTTTTTTTTTTTTCCCCCCLLLLLLLLRRRRRRRRRRRFFFFFFFFFFFPPPPPPPGGGGQQQQQQQQQLLLLLLLLNNNNNNNNAAAAADDDDDDDDLLLLLLLLRRRRRRRRRRRKKKKKKKKKLLLLLLLLAAAAAVVVVVVVNNNNNNNNMMMMMMMMVVVVVVVPPPPPPPFFFFFFFFFFFPPPPPPPRRRRRRRRRRRLLLLLLLLHHHHHHHHHHFFFFFFFFFFFFFFFFFFFFFFMMMMMMMMPPPPPPPGGGGFFFFFFFFFFFAAAAAPPPPPPPLLLLLLLLTTTTTTTSSSSSSRRRRRRRRRRRGGGGSSSSSSQQQQQQQQQQQQQQQQQQYYYYYYYYYYYYRRRRRRRRRRRAAAAALLLLLLLLTTTTTTTVVVVVVVPPPPPPPEEEEEEEEELLLLLLLLTTTTTTTQQQQQQQQQQQQQQQQQQMMMMMMMMFFFFFFFFFFFDDDDDDDDAAAAAKKKKKKKKKNNNNNNNNMMMMMMMMMMMMMMMMAAAAAAAAAACCCCCCDDDDDDDDPPPPPPPRRRRRRRRRRRHHHHHHHHHHGGGGRRRRRRRRRRRYYYYYYYYYYYYLLLLLLLLTTTTTTTVVVVVVVAAAAAAAAAAIIIIIIIIFFFFFFFFFFFRRRRRRRRRRRGGGGRRRRRRRRRRRMMMMMMMMSSSSSSMMMMMMMMKKKKKKKKKEEEEEEEEEVVVVVVVDDDDDDDDEEEEEEEEEQQQQQQQQQMMMMMMMMLLLLLLLLNNNNNNNNVVVVVVVQQQQQQQQQNNNNNNNNKKKKKKKKKNNNNNNNNSSSSSSSSSSSSYYYYYYYYYYYYFFFFFFFFFFFVVVVVVVEEEEEEEEEWWWWWWWWWWWWWWIIIIIIIIPPPPPPPNNNNNNNNNNNNNNNNVVVVVVVKKKKKKKKKTTTTTTTAAAAAVVVVVVVCCCCCCDDDDDDDDIIIIIIIIPPPPPPPPPPPPPPRRRRRRRRRRRGGGGLLLLLLLLKKKKKKKKKMMMMMMMMSSSSSSSSSSSSTTTTTTTFFFFFFFFFFFIIIIIIIIGGGGNNNNNNNNSSSSSSTTTTTTTAAAAAIIIIIIIIQQQQQQQQQEEEEEEEEELLLLLLLLFFFFFFFFFFFKKKKKKKKKRRRRRRRRRRRMMMMMMMMSSSSSSEEEEEEEEEQQQQQQQQQFFFFFFFFFFFTTTTTTTAAAAAMMMMMMMMFFFFFFFFFFFRRRRRRRRRRRRRRRRRRRRRRKKKKKKKKKAAAAAFFFFFFFFFFFLLLLLLLLHHHHHHHHHHWWWWWWWWWWWWWWYYYYYYYYYYYYTTTTTTTGGGGEEEEEEEEEGGGGMMMMMMMMDDDDDDDDEEEEEEEEEMMMMMMMMEEEEEEEEEFFFFFFFFFFFTTTTTTTEEEEEEEEEAAAAAEEEEEEEEESSSSSSNNNNNNNNMMMMMMMMNNNNNNNNDDDDDDDDLLLLLLLLVVVVVVVSSSSSSEEEEEEEEEYYYYYYYYYYYYQQQQQQQQQQQQQQQQQQYYYYYYYYYYYYQQQQQQQQQDDDDDDDDAAAAATTTTTTTAAAAAEEEEEEEEEEEEEEEEEEEEEEEEEEEGGGGEEEEEEEEEGGGGEEEEEEEEEEEEEEEEEEEEEEEEEEEGGGGDDDDDDDDEEEEEEEEEEEEEEEEEEVVVVVVVAAAAAA

SEQ ID NO: 245 - protein, 3397 aa, Homo sapiens
MMMMMMMMRRRRRRRRRRREEEEEEEEEIIIIIIIIVVVVVVVLLLLLLLLTTTTTTTQQQQQQQQQTTTTTTTGGGGQQQQQQQQQCCCCCCGGGGNNNNNNNNQQQQQQQQQIIIIIIIIGGGGAAAAAKKKKKKKKKFFFFFFFFFFFWWWWWWWWWWWWWWEEEEEEEEEVVVVVVVIIIIIIIISSSSSSDDDDDDDDEEEEEEEEEHHHHHHHHHHAAAAAIIIIIIIIDDDDDDDDSSSSSSAAAAAGGGGTTTTTTTYYYYYYYYYYYYHHHHHHHHHHGGGGDDDDDDDDSSSSSSHHHHHHHHHHLLLLLLLLQQQQQQQQQLLLLLLLLEEEEEEEEERRRRRRRRRRRIIIIIIIINNNNNNNNVVVVVVVHHHHHHHHHHHHHHHHHHHHHHHHHHHHHHEEEEEEEEEAAAAASSSSSSGGGGGGGGRRRRRRRRRRRYYYYYYYYYYYYVVVVVVVPPPPPPPRRRRRRRRRRRAAAAAVVVVVVVLLLLLLLLVVVVVVVDDDDDDDDLLLLLLLLEEEEEEEEEPPPPPPPGGGGTTTTTTTMMMMMMMMDDDDDDDDSSSSSSVVVVVVVRRRRRRRRRRRSSSSSSGGGGPPPPPPPFFFFFFFFFFFAAAAAEEEEEEEEEVVVVVVVFFFFFFFFFFFRRRRRRRRRRRPPPPPPPDDDDDDDDNNNNNNNNFFFFFFFFFFFIIIIIIIISSSSSSRRRRRRRRRRRQQQQQQQQQCCCCCCGGGGAAAAAGGGGNNNNNNNNNNNNNNNNWWWWWWWWWWWWWWAAAAAKKKKKKKKKGGGGRRRRRRRRRRRYYYYYYYYYYYYTTTTTTTEEEEEEEEEGGGGAAAAAEEEEEEEEELLLLLLLLMMMMMMMMEEEEEEEEESSSSSSVVVVVVVMMMMMMMMDDDDDDDDVVVVVVVVVVVVVVRRRRRRRRRRRKKKKKKKKKEEEEEEEEEAAAAAEEEEEEEEESSSSSSCCCCCCDDDDDDDDCCCCCCLLLLLLLLQQQQQQQQQGGGGFFFFFFFFFFFQQQQQQQQQLLLLLLLLTTTTTTTHHHHHHHHHHSSSSSSLLLLLLLLGGGGGGGGGGGGTTTTTTTGGGGSSSSSSGGGGMMMMMMMMGGGGTTTTTTTLLLLLLLLLLLLLLLLLLLLLLLLSSSSSSKKKKKKKKKIIIIIIIIRRRRRRRRRRREEEEEEEEEEEEEEEEEEYYYYYYYYYYYYPPPPPPPDDDDDDDDRRRRRRRRRRRIIIIIIIIIIIIIIIINNNNNNNNTTTTTTTFFFFFFFFFFFSSSSSSIIIIIIIILLLLLLLLPPPPPPPSSSSSSPPPPPPPKKKKKKKKKVVVVVVVSSSSSSDDDDDDDDTTTTTTTVVVVVVVVVVVVVVEEEEEEEEEPPPPPPPYYYYYYYYYYYYNNNNNNNNAAAAATTTTTTTLLLLLLLLSSSSSSVVVVVVVHHHHHHHHHHQQQQQQQQQLLLLLLLLIIIIIIIIEEEEEEEEENNNNNNNNAAAAADDDDDDDDEEEEEEEEETTTTTTTFFFFFFFFFFFCCCCCCIIIIIIIIDDDDDDDDNNNNNNNNEEEEEEEEEAAAAALLLLLLLLYYYYYYYYYYYYDDDDDDDDIIIIIIIICCCCCCSSSSSSRRRRRRRRRRRTTTTTTTLLLLLLLLKKKKKKKKKLLLLLLLLPPPPPPPTTTTTTTPPPPPPPTTTTTTTYYYYYYYYYYYYGGGGDDDDDDDDLLLLLLLLNNNNNNNNHHHHHHHHHHLLLLLLLLVVVVVVVSSSSSSAAAAATTTTTTTVVVVVVVSSSSSSGGGGVVVVVVVTTTTTTTTTTTTTTCCCCCCLLLLLLLLRRRRRRRRRRRFFFFFFFFFFFPPPPPPPGGGGQQQQQQQQQLLLLLLLLNNNNNNNNAAAAADDDDDDDDLLLLLLLLRRRRRRRRRRRKKKKKKKKKLLLLLLLLAAAAAVVVVVVVNNNNNNNNMMMMMMMMVVVVVVVPPPPPPPFFFFFFFFFFFPPPPPPPRRRRRRRRRRRLLLLLLLLHHHHHHHHHHFFFFFFFFFFFFFFFFFFFFFFMMMMMMMMPPPPPPPGGGGFFFFFFFFFFFAAAAAPPPPPPPLLLLLLLLTTTTTTTSSSSSSQQQQQQQQQGGGGSSSSSSQQQQQQQQQQQQQQQQQQYYYYYYYYYYYYRRRRRRRRRRRAAAAALLLLLLLLTTTTTTTVVVVVVVAAAAAEEEEEEEEELLLLLLLLTTTTTTTQQQQQQQQQQQQQQQQQQMMMMMMMMFFFFFFFFFFFDDDDDDDDAAAAAKKKKKKKKKNNNNNNNNMMMMMMMMMMMMMMMMAAAAAAAAAARRRRRRRRRRRDDDDDDDDPPPPPPPRRRRRRRRRRRHHHHHHHHHHGGGGCCCCCCYYYYYYYYYYYYLLLLLLLLTTTTTTTAAAAAAAAAAAAAAAIIIIIIIIFFFFFFFFFFFRRRRRRRRRRRGGGGRRRRRRRRRRRMMMMMMMMPPPPPPPMMMMMMMMRRRRRRRRRRREEEEEEEEEVVVVVVVDDDDDDDDEEEEEEEEEQQQQQQQQQMMMMMMMMFFFFFFFFFFFNNNNNNNNIIIIIIIIQQQQQQQQQDDDDDDDDKKKKKKKKKNNNNNNNNSSSSSSSSSSSSYYYYYYYYYYYYFFFFFFFFFFFAAAAADDDDDDDDWWWWWWWWWWWWWWLLLLLLLLPPPPPPPNNNNNNNNNNNNNNNNIIIIIIIIKKKKKKKKKTTTTTTTAAAAAVVVVVVVCCCCCCDDDDDDDDIIIIIIIIPPPPPPPPPPPPPPWWWWWWWWWWWWWWGGGGLLLLLLLLKKKKKKKKKMMMMMMMMSSSSSSVVVVVVVTTTTTTTFFFFFFFFFFFTTTTTTTGGGGNNNNNNNNNNNNNNNNTTTTTTTAAAAAVVVVVVVQQQQQQQQQEEEEEEEEELLLLLLLLKKKKKKKKKRRRRRRRRRRRVVVVVVVSSSSSSEEEEEEEEEQQQQQQQQQFFFFFFFFFFFTTTTTTTAAAAATTTTTTTFFFFFFFFFFFRRRRRRRRRRRRRRRRRRRRRRKKKKKKKKKAAAAAFFFFFFFFFFFLLLLLLLLHHHHHHHHHHWWWWWWWWWWWWWWYYYYYYYYYYYYTTTTTTTGGGGEEEEEEEEEGGGGMMMMMMMMDDDDDDDDEEEEEEEEEMMMMMMMMEEEEEEEEEFFFFFFFFFFFTTTTTTTEEEEEEEEEAAAAAEEEEEEEEESSSSSSNNNNNNNNMMMMMMMMNNNNNNNNDDDDDDDDLLLLLLLLVVVVVVVSSSSSSEEEEEEEEEYYYYYYYYYYYYQQQQQQQQQQQQQQQQQQYYYYYYYYYYYYQQQQQQQQQDDDDDDDDAAAAATTTTTTTAAAAAEEEEEEEEEGGGGEEEEEEEEEGGGGVVVVVVVV

SEQ ID NO: 246 - protein, 3499 aa, Rhynchosporium secalis
MMMMMMMMRRRRRRRRRRREEEEEEEEEIIIIIIIIVVVVVVVHHHHHHHHHHLLLLLLLLQQQQQQQQQTTTTTTTGGGGQQQQQQQQQCCCCCCGGGGNNNNNNNNQQQQQQQQQIIIIIIIIGGGGAAAAAAAAAAFFFFFFFFFFFWWWWWWWWWWWWWWQQQQQQQQQTTTTTTTIIIIIIIISSSSSSGGGGEEEEEEEEEHHHHHHHHHHGGGGLLLLLLLLDDDDDDDDGGGGSSSSSSGGGGVVVVVVVYYYYYYYYYYYYNNNNNNNNGGGGTTTTTTTSSSSSSDDDDDDDDLLLLLLLLQQQQQQQQQLLLLLLLLEEEEEEEEERRRRRRRRRRRLLLLLLLLNNNNNNNNVVVVVVVYYYYYYYYYYYYFFFFFFFFFFFNNNNNNNNEEEEEEEEEAAAAASSSSSSGGGGNNNNNNNNKKKKKKKKKYYYYYYYYYYYYVVVVVVVPPPPPPPRRRRRRRRRRRAAAAAVVVVVVVLLLLLLLLVVVVVVVDDDDDDDDLLLLLLLLEEEEEEEEEPPPPPPPGGGGTTTTTTTMMMMMMMMDDDDDDDDAAAAAVVVVVVVRRRRRRRRRRRAAAAAGGGGPPPPPPPFFFFFFFFFFFGGGGQQQQQQQQQLLLLLLLLFFFFFFFFFFFRRRRRRRRRRRPPPPPPPDDDDDDDDNNNNNNNNFFFFFFFFFFFVVVVVVVFFFFFFFFFFFGGGGQQQQQQQQQSSSSSSGGGGAAAAAGGGGNNNNNNNNNNNNNNNNWWWWWWWWWWWWWWAAAAAKKKKKKKKKGGGGHHHHHHHHHHYYYYYYYYYYYYTTTTTTTEEEEEEEEEGGGGAAAAAEEEEEEEEELLLLLLLLVVVVVVVDDDDDDDDQQQQQQQQQVVVVVVVLLLLLLLLDDDDDDDDVVVVVVVVVVVVVVRRRRRRRRRRRRRRRRRRRRRREEEEEEEEEAAAAAEEEEEEEEEGGGGCCCCCCDDDDDDDDCCCCCCLLLLLLLLQQQQQQQQQGGGGFFFFFFFFFFFQQQQQQQQQIIIIIIIITTTTTTTHHHHHHHHHHSSSSSSLLLLLLLLGGGGGGGGGGGGTTTTTTTGGGGAAAAAGGGGMMMMMMMMGGGGTTTTTTTLLLLLLLLLLLLLLLLIIIIIIIISSSSSSKKKKKKKKKIIIIIIIIRRRRRRRRRRREEEEEEEEEEEEEEEEEEFFFFFFFFFFFPPPPPPPDDDDDDDDRRRRRRRRRRRMMMMMMMMMMMMMMMMAAAAATTTTTTTFFFFFFFFFFFSSSSSSVVVVVVVVVVVVVVPPPPPPPSSSSSSPPPPPPPKKKKKKKKKVVVVVVVSSSSSSDDDDDDDDTTTTTTTVVVVVVVVVVVVVVEEEEEEEEEPPPPPPPYYYYYYYYYYYYNNNNNNNNAAAAATTTTTTTLLLLLLLLSSSSSSIIIIIIIIHHHHHHHHHHQQQQQQQQQLLLLLLLLVVVVVVVEEEEEEEEENNNNNNNNSSSSSSDDDDDDDDEEEEEEEEETTTTTTTFFFFFFFFFFFCCCCCCIIIIIIIIDDDDDDDDNNNNNNNNEEEEEEEEEAAAAALLLLLLLLYYYYYYYYYYYYDDDDDDDDIIIIIIIICCCCCCMMMMMMMMRRRRRRRRRRRTTTTTTTLLLLLLLLKKKKKKKKKLLLLLLLLTTTTTTTNNNNNNNNPPPPPPPSSSSSSYYYYYYYYYYYYGGGGDDDDDDDDLLLLLLLLNNNNNNNNHHHHHHHHHHLLLLLLLLVVVVVVVSSSSSSAAAAAVVVVVVVMMMMMMMMSSSSSSGGGGVVVVVVVTTTTTTTTTTTTTTCCCCCCLLLLLLLLRRRRRRRRRRRFFFFFFFFFFFPPPPPPPGGGGQQQQQQQQQLLLLLLLLNNNNNNNNSSSSSSDDDDDDDDLLLLLLLLRRRRRRRRRRRKKKKKKKKKLLLLLLLLAAAAAVVVVVVVNNNNNNNNMMMMMMMMVVVVVVVPPPPPPPFFFFFFFFFFFPPPPPPPRRRRRRRRRRRLLLLLLLLHHHHHHHHHHFFFFFFFFFFFFFFFFFFFFFFMMMMMMMMVVVVVVVGGGGFFFFFFFFFFFAAAAAPPPPPPPLLLLLLLLTTTTTTTSSSSSSRRRRRRRRRRRGGGGAAAAAHHHHHHHHHHSSSSSSFFFFFFFFFFFRRRRRRRRRRRAAAAAVVVVVVVTTTTTTTVVVVVVVPPPPPPPEEEEEEEEELLLLLLLLTTTTTTTQQQQQQQQQQQQQQQQQQMMMMMMMMFFFFFFFFFFFDDDDDDDDPPPPPPPKKKKKKKKKNNNNNNNNMMMMMMMMMMMMMMMMAAAAAAAAAASSSSSSDDDDDDDDFFFFFFFFFFFRRRRRRRRRRRNNNNNNNNGGGGRRRRRRRRRRRYYYYYYYYYYYYLLLLLLLLTTTTTTTCCCCCCSSSSSSAAAAAIIIIIIIIFFFFFFFFFFFRRRRRRRRRRRGGGGKKKKKKKKKVVVVVVVSSSSSSMMMMMMMMKKKKKKKKKEEEEEEEEEVVVVVVVEEEEEEEEEDDDDDDDDQQQQQQQQQMMMMMMMMRRRRRRRRRRRNNNNNNNNVVVVVVVQQQQQQQQQNNNNNNNNKKKKKKKKKNNNNNNNNSSSSSSSSSSSSYYYYYYYYYYYYFFFFFFFFFFFVVVVVVVEEEEEEEEEWWWWWWWWWWWWWWIIIIIIIIPPPPPPPTTTTTTTNNNNNNNNVVVVVVVQQQQQQQQQTTTTTTTAAAAALLLLLLLLCCCCCCSSSSSSIIIIIIIIPPPPPPPPPPPPPPRRRRRRRRRRRGGGGLLLLLLLLKKKKKKKKKMMMMMMMMSSSSSSSSSSSSTTTTTTTFFFFFFFFFFFVVVVVVVGGGGNNNNNNNNSSSSSSTTTTTTTSSSSSSIIIIIIIIQQQQQQQQQEEEEEEEEELLLLLLLLFFFFFFFFFFFKKKKKKKKKRRRRRRRRRRRIIIIIIIIGGGGDDDDDDDDQQQQQQQQQFFFFFFFFFFFTTTTTTTRRRRRRRRRRRMMMMMMMMFFFFFFFFFFFRRRRRRRRRRRRRRRRRRRRRRKKKKKKKKKAAAAAFFFFFFFFFFFLLLLLLLLHHHHHHHHHHWWWWWWWWWWWWWWYYYYYYYYYYYYTTTTTTTGGGGEEEEEEEEEGGGGMMMMMMMMDDDDDDDDEEEEEEEEEMMMMMMMMEEEEEEEEEFFFFFFFFFFFTTTTTTTEEEEEEEEEAAAAAEEEEEEEEESSSSSSNNNNNNNNMMMMMMMMNNNNNNNNDDDDDDDDLLLLLLLLVVVVVVVSSSSSSEEEEEEEEEYYYYYYYYYYYYQQQQQQQQQQQQQQQQQQYYYYYYYYYYYYQQQQQQQQQDDDDDDDDAAAAASSSSSSIIIIIIIISSSSSSEEEEEEEEEGGGGEEEEEEEEEEEEEEEEEEEEEEEEEEEYYYYYYYYYYYYEEEEEEEEEEEEEEEEEEEEEEEEEEEAAAAAPPPPPPPMMMMMMMMEEEEEEEEEPPPPPPPEEEEEEEEEEEEEEEEEEE

SEQ ID NO: 247 - protein, 3504 aa, Schizophyllum commune
MMMMMMMMRRRRRRRRRRREEEEEEEEEIIIIIIIIVVVVVVVHHHHHHHHHHLLLLLLLLQQQQQQQQQTTTTTTTGGGGQQQQQQQQQCCCCCCGGGGNNNNNNNNQQQQQQQQQIIIIIIIIGGGGAAAAAKKKKKKKKKFFFFFFFFFFFWWWWWWWWWWWWWWEEEEEEEEEVVVVVVVVVVVVVVSSSSSSDDDDDDDDEEEEEEEEEHHHHHHHHHHGGGGIIIIIIIIEEEEEEEEEAAAAADDDDDDDDGGGGLLLLLLLLYYYYYYYYYYYYKKKKKKKKKGGGGTTTTTTTNNNNNNNNDDDDDDDDQQQQQQQQQQQQQQQQQQLLLLLLLLEEEEEEEEERRRRRRRRRRRIIIIIIIISSSSSSVVVVVVVYYYYYYYYYYYYYYYYYYYYYYYYNNNNNNNNEEEEEEEEEIIIIIIIIGGGGAAAAANNNNNNNNKKKKKKKKKYYYYYYYYYYYYVVVVVVVPPPPPPPRRRRRRRRRRRAAAAAIIIIIIIILLLLLLLLVVVVVVVDDDDDDDDLLLLLLLLEEEEEEEEEPPPPPPPGGGGTTTTTTTMMMMMMMMDDDDDDDDSSSSSSVVVVVVVRRRRRRRRRRRSSSSSSGGGGPPPPPPPLLLLLLLLGGGGGGGGLLLLLLLLFFFFFFFFFFFRRRRRRRRRRRPPPPPPPDDDDDDDDNNNNNNNNFFFFFFFFFFFVVVVVVVFFFFFFFFFFFGGGGQQQQQQQQQSSSSSSGGGGAAAAAGGGGNNNNNNNNNNNNNNNNWWWWWWWWWWWWWWAAAAAKKKKKKKKKGGGGHHHHHHHHHHYYYYYYYYYYYYTTTTTTTEEEEEEEEEGGGGAAAAAEEEEEEEEELLLLLLLLVVVVVVVDDDDDDDDAAAAAVVVVVVVLLLLLLLLDDDDDDDDVVVVVVVVVVVVVVRRRRRRRRRRRKKKKKKKKKEEEEEEEEEAAAAAEEEEEEEEEGGGGTTTTTTTDDDDDDDDCCCCCCLLLLLLLLQQQQQQQQQGGGGFFFFFFFFFFFQQQQQQQQQIIIIIIIITTTTTTTHHHHHHHHHHSSSSSSLLLLLLLLGGGGGGGGGGGGTTTTTTTGGGGAAAAAGGGGMMMMMMMMGGGGTTTTTTTLLLLLLLLLLLLLLLLIIIIIIIISSSSSSKKKKKKKKKIIIIIIIIRRRRRRRRRRREEEEEEEEEEEEEEEEEEYYYYYYYYYYYYPPPPPPPDDDDDDDDRRRRRRRRRRRMMMMMMMMMMMMMMMMCCCCCCTTTTTTTFFFFFFFFFFFSSSSSSVVVVVVVVVVVVVVPPPPPPPSSSSSSPPPPPPPKKKKKKKKKVVVVVVVSSSSSSDDDDDDDDTTTTTTTVVVVVVVVVVVVVVEEEEEEEEEPPPPPPPYYYYYYYYYYYYNNNNNNNNAAAAATTTTTTTLLLLLLLLSSSSSSVVVVVVVHHHHHHHHHHQQQQQQQQQLLLLLLLLVVVVVVVEEEEEEEEENNNNNNNNSSSSSSDDDDDDDDEEEEEEEEETTTTTTTFFFFFFFFFFFCCCCCCIIIIIIIIDDDDDDDDNNNNNNNNEEEEEEEEEAAAAALLLLLLLLYYYYYYYYYYYYDDDDDDDDIIIIIIIICCCCCCFFFFFFFFFFFRRRRRRRRRRRTTTTTTTLLLLLLLLKKKKKKKKKLLLLLLLLSSSSSSTTTTTTTPPPPPPPTTTTTTTYYYYYYYYYYYYGGGGDDDDDDDDLLLLLLLLNNNNNNNNHHHHHHHHHHLLLLLLLLVVVVVVVSSSSSSFFFFFFFFFFFVVVVVVVMMMMMMMMSSSSSSGGGGIIIIIIIITTTTTTTTTTTTTTSSSSSSLLLLLLLLRRRRRRRRRRRFFFFFFFFFFFPPPPPPPGGGGQQQQQQQQQLLLLLLLLNNNNNNNNSSSSSSDDDDDDDDLLLLLLLLRRRRRRRRRRRKKKKKKKKKLLLLLLLLAAAAAVVVVVVVNNNNNNNNLLLLLLLLVVVVVVVPPPPPPPFFFFFFFFFFFPPPPPPPRRRRRRRRRRRLLLLLLLLHHHHHHHHHHFFFFFFFFFFFFFFFFFFFFFFMMMMMMMMTTTTTTTGGGGFFFFFFFFFFFAAAAAPPPPPPPLLLLLLLLTTTTTTTAAAAARRRRRRRRRRRGGGGSSSSSSQQQQQQQQQQQQQQQQQQYYYYYYYYYYYYRRRRRRRRRRRAAAAAVVVVVVVTTTTTTTVVVVVVVPPPPPPPEEEEEEEEELLLLLLLLTTTTTTTQQQQQQQQQQQQQQQQQQMMMMMMMMFFFFFFFFFFFDDDDDDDDAAAAAKKKKKKKKKNNNNNNNNMMMMMMMMMMMMMMMMAAAAAAAAAASSSSSSDDDDDDDDPPPPPPPRRRRRRRRRRRHHHHHHHHHHGGGGRRRRRRRRRRRYYYYYYYYYYYYLLLLLLLLTTTTTTTVVVVVVVAAAAAAAAAAMMMMMMMMFFFFFFFFFFFRRRRRRRRRRRGGGGKKKKKKKKKVVVVVVVSSSSSSMMMMMMMMKKKKKKKKKEEEEEEEEEVVVVVVVEEEEEEEEEEEEEEEEEEQQQQQQQQQMMMMMMMMQQQQQQQQQNNNNNNNNVVVVVVVQQQQQQQQQNNNNNNNNKKKKKKKKKNNNNNNNNSSSSSSAAAAAYYYYYYYYYYYYFFFFFFFFFFFVVVVVVVEEEEEEEEEWWWWWWWWWWWWWWIIIIIIIIPPPPPPPNNNNNNNNNNNNNNNNVVVVVVVLLLLLLLLAAAAASSSSSSQQQQQQQQQCCCCCCDDDDDDDDIIIIIIIIAAAAAPPPPPPPRRRRRRRRRRRGGGGLLLLLLLLRRRRRRRRRRRMMMMMMMMSSSSSSVVVVVVVTTTTTTTFFFFFFFFFFFLLLLLLLLGGGGNNNNNNNNSSSSSSTTTTTTTAAAAAIIIIIIIIQQQQQQQQQEEEEEEEEELLLLLLLLFFFFFFFFFFFKKKKKKKKKRRRRRRRRRRRVVVVVVVSSSSSSDDDDDDDDQQQQQQQQQFFFFFFFFFFFTTTTTTTAAAAAMMMMMMMMFFFFFFFFFFFKKKKKKKKKRRRRRRRRRRRKKKKKKKKKAAAAAFFFFFFFFFFFLLLLLLLLHHHHHHHHHHWWWWWWWWWWWWWWYYYYYYYYYYYYTTTTTTTQQQQQQQQQEEEEEEEEEGGGGMMMMMMMMDDDDDDDDEEEEEEEEEMMMMMMMMEEEEEEEEEFFFFFFFFFFFTTTTTTTEEEEEEEEEAAAAAEEEEEEEEESSSSSSNNNNNNNNMMMMMMMMQQQQQQQQQDDDDDDDDLLLLLLLLVVVVVVVAAAAAEEEEEEEEEYYYYYYYYYYYYQQQQQQQQQQQQQQQQQQYYYYYYYYYYYYQQQQQQQQQDDDDDDDDAAAAATTTTTTTVVVVVVVEEEEEEEEEEEEEEEEEEEEEEEEEEEGGGGEEEEEEEEEYYYYYYYYYYYYEEEEEEEEEEEEEEEEEEEEEEEEEEEVVVVVVVIIIIIIIIEEEEEEEEEDDDDDDDDQQQQQQQQQEEEEEEEEEE

SEQ ID NO: 248 - protein, 3476 aa, Schizosaccharomyces pombe
MMMMMMMMRRRRRRRRRRREEEEEEEEEIIIIIIIIVVVVVVVHHHHHHHHHHIIIIIIIIQQQQQQQQQAAAAAGGGGQQQQQQQQQCCCCCCGGGGNNNNNNNNQQQQQQQQQVVVVVVVGGGGAAAAAAAAAAFFFFFFFFFFFWWWWWWWWWWWWWWSSSSSSTTTTTTTIIIIIIIIAAAAADDDDDDDDEEEEEEEEEHHHHHHHHHHGGGGLLLLLLLLDDDDDDDDSSSSSSAAAAAGGGGIIIIIIIIYYYYYYYYYYYYHHHHHHHHHHGGGGTTTTTTTSSSSSSEEEEEEEEEAAAAAQQQQQQQQQHHHHHHHHHHEEEEEEEEERRRRRRRRRRRLLLLLLLLNNNNNNNNVVVVVVVYYYYYYYYYYYYFFFFFFFFFFFNNNNNNNNEEEEEEEEEAAAAAAAAAAGGGGGGGGKKKKKKKKKYYYYYYYYYYYYVVVVVVVPPPPPPPRRRRRRRRRRRAAAAAVVVVVVVLLLLLLLLVVVVVVVDDDDDDDDLLLLLLLLEEEEEEEEEPPPPPPPGGGGTTTTTTTMMMMMMMMDDDDDDDDAAAAAVVVVVVVKKKKKKKKKSSSSSSGGGGKKKKKKKKKFFFFFFFFFFFGGGGNNNNNNNNLLLLLLLLFFFFFFFFFFFRRRRRRRRRRRPPPPPPPDDDDDDDDNNNNNNNNIIIIIIIIIIIIIIIIYYYYYYYYYYYYGGGGQQQQQQQQQSSSSSSGGGGAAAAAGGGGNNNNNNNNIIIIIIIIWWWWWWWWWWWWWWAAAAAKKKKKKKKKGGGGHHHHHHHHHHYYYYYYYYYYYYTTTTTTTEEEEEEEEEGGGGAAAAAEEEEEEEEELLLLLLLLAAAAADDDDDDDDAAAAAVVVVVVVLLLLLLLLDDDDDDDDVVVVVVVVVVVVVVRRRRRRRRRRRRRRRRRRRRRREEEEEEEEEAAAAAEEEEEEEEEAAAAACCCCCCDDDDDDDDAAAAALLLLLLLLQQQQQQQQQGGGGFFFFFFFFFFFQQQQQQQQQLLLLLLLLTTTTTTTHHHHHHHHHHSSSSSSLLLLLLLLGGGGGGGGGGGGTTTTTTTGGGGSSSSSSGGGGMMMMMMMMGGGGTTTTTTTLLLLLLLLLLLLLLLLLLLLLLLLSSSSSSKKKKKKKKKIIIIIIIIRRRRRRRRRRREEEEEEEEEEEEEEEEEEYYYYYYYYYYYYPPPPPPPDDDDDDDDRRRRRRRRRRRMMMMMMMMMMMMMMMMAAAAATTTTTTTFFFFFFFFFFFSSSSSSVVVVVVVAAAAAPPPPPPPAAAAAPPPPPPPKKKKKKKKKSSSSSSSSSSSSDDDDDDDDTTTTTTTVVVVVVVVVVVVVVEEEEEEEEEPPPPPPPYYYYYYYYYYYYNNNNNNNNAAAAATTTTTTTLLLLLLLLSSSSSSMMMMMMMMHHHHHHHHHHQQQQQQQQQLLLLLLLLVVVVVVVEEEEEEEEENNNNNNNNSSSSSSDDDDDDDDEEEEEEEEETTTTTTTFFFFFFFFFFFCCCCCCIIIIIIIIDDDDDDDDNNNNNNNNEEEEEEEEEAAAAALLLLLLLLSSSSSSSSSSSSIIIIIIIIFFFFFFFFFFFAAAAANNNNNNNNTTTTTTTLLLLLLLLKKKKKKKKKIIIIIIIIKKKKKKKKKSSSSSSPPPPPPPSSSSSSYYYYYYYYYYYYDDDDDDDDDDDDDDDDLLLLLLLLNNNNNNNNHHHHHHHHHHLLLLLLLLVVVVVVVSSSSSSAAAAAVVVVVVVMMMMMMMMAAAAAGGGGVVVVVVVTTTTTTTTTTTTTTSSSSSSFFFFFFFFFFFRRRRRRRRRRRFFFFFFFFFFFPPPPPPPGGGGEEEEEEEEELLLLLLLLNNNNNNNNSSSSSSDDDDDDDDLLLLLLLLRRRRRRRRRRRKKKKKKKKKLLLLLLLLAAAAAVVVVVVVNNNNNNNNMMMMMMMMVVVVVVVPPPPPPPFFFFFFFFFFFPPPPPPPRRRRRRRRRRRLLLLLLLLHHHHHHHHHHFFFFFFFFFFFFFFFFFFFFFFMMMMMMMMVVVVVVVGGGGFFFFFFFFFFFAAAAAPPPPPPPLLLLLLLLAAAAAAAAAAIIIIIIIIGGGGSSSSSSSSSSSSSSSSSSFFFFFFFFFFFQQQQQQQQQAAAAAVVVVVVVSSSSSSVVVVVVVPPPPPPPEEEEEEEEELLLLLLLLTTTTTTTQQQQQQQQQQQQQQQQQQMMMMMMMMFFFFFFFFFFFDDDDDDDDAAAAANNNNNNNNNNNNNNNNMMMMMMMMMMMMMMMMVVVVVVVAAAAAAAAAADDDDDDDDPPPPPPPRRRRRRRRRRRHHHHHHHHHHGGGGRRRRRRRRRRRYYYYYYYYYYYYLLLLLLLLTTTTTTTVVVVVVVAAAAAAAAAALLLLLLLLFFFFFFFFFFFRRRRRRRRRRRGGGGKKKKKKKKKVVVVVVVSSSSSSMMMMMMMMKKKKKKKKKEEEEEEEEEVVVVVVVDDDDDDDDEEEEEEEEEQQQQQQQQQIIIIIIIIRRRRRRRRRRRSSSSSSVVVVVVVQQQQQQQQQTTTTTTTKKKKKKKKKNNNNNNNNSSSSSSAAAAAYYYYYYYYYYYYFFFFFFFFFFFVVVVVVVEEEEEEEEEWWWWWWWWWWWWWWIIIIIIIIPPPPPPPDDDDDDDDNNNNNNNNVVVVVVVLLLLLLLLKKKKKKKKKAAAAAVVVVVVVCCCCCCSSSSSSVVVVVVVPPPPPPPPPPPPPPKKKKKKKKKDDDDDDDDLLLLLLLLKKKKKKKKKMMMMMMMMSSSSSSAAAAATTTTTTTFFFFFFFFFFFIIIIIIIIGGGGNNNNNNNNSSSSSSTTTTTTTSSSSSSIIIIIIIIQQQQQQQQQEEEEEEEEEIIIIIIIIFFFFFFFFFFFRRRRRRRRRRRRRRRRRRRRRRLLLLLLLLGGGGDDDDDDDDQQQQQQQQQFFFFFFFFFFFSSSSSSAAAAAMMMMMMMMFFFFFFFFFFFRRRRRRRRRRRRRRRRRRRRRRKKKKKKKKKAAAAAFFFFFFFFFFFLLLLLLLLHHHHHHHHHHWWWWWWWWWWWWWWYYYYYYYYYYYYTTTTTTTGGGGEEEEEEEEEGGGGMMMMMMMMDDDDDDDDEEEEEEEEEMMMMMMMMEEEEEEEEEFFFFFFFFFFFTTTTTTTEEEEEEEEEAAAAAEEEEEEEEESSSSSSNNNNNNNNMMMMMMMMNNNNNNNNDDDDDDDDLLLLLLLLVVVVVVVSSSSSSEEEEEEEEEYYYYYYYYYYYYQQQQQQQQQQQQQQQQQQYYYYYYYYYYYYQQQQQQQQQEEEEEEEEEAAAAAGGGGIIIIIIIIDDDDDDDDEEEEEEEEEGGGGDDDDDDDDEEEEEEEEEDDDDDDDDYYYYYYYYYYYYEEEEEEEEEIIIIIIIIEEEEEEEEEEEEEEEEEEEEEEEEEEEKKKKKKKKKEEEEEEEEEPPPPPPPLLLLLLLLEEEEEEEEEYYYYYYYYYYYYY

SEQ ID NO: 249 - protein, 2336 aa, Strongylocentrotus purpuratus
RRRRRRRRRRREEEEEEEEEEEEEEEEEEYYYYYYYYYYYYPPPPPPPDDDDDDDDRRRRRRRRRRRIIIIIIIIMMMMMMMMNNNNNNNNTTTTTTTFFFFFFFFFFFSSSSSSVVVVVVVVVVVVVVPPPPPPPSSSSSSPPPPPPPKKKKKKKKKVVVVVVVSSSSSSDDDDDDDDTTTTTTTVVVVVVVVVVVVVVEEEEEEEEEPPPPPPPYYYYYYYYYYYYNNNNNNNNAAAAATTTTTTTLLLLLLLLSSSSSSVVVVVVVHHHHHHHHHHQQQQQQQQQLLLLLLLLVVVVVVVEEEEEEEEENNNNNNNNTTTTTTTDDDDDDDDEEEEEEEEETTTTTTTYYYYYYYYYYYYCCCCCCIIIIIIIIDDDDDDDDNNNNNNNNEEEEEEEEEAAAAALLLLLLLLYYYYYYYYYYYYDDDDDDDDIIIIIIIICCCCCCFFFFFFFFFFFRRRRRRRRRRRTTTTTTTLLLLLLLLKKKKKKKKKLLLLLLLLTTTTTTTTTTTTTTPPPPPPPTTTTTTTYYYYYYYYYYYYGGGGDDDDDDDDLLLLLLLLNNNNNNNNHHHHHHHHHHLLLLLLLLVVVVVVVSSSSSSAAAAATTTTTTTMMMMMMMMSSSSSSGGGGVVVVVVVTTTTTTTTTTTTTTCCCCCCLLLLLLLLRRRRRRRRRRRFFFFFFFFFFFPPPPPPPGGGGQQQQQQQQQLLLLLLLLNNNNNNNNAAAAADDDDDDDDLLLLLLLLRRRRRRRRRRRKKKKKKKKKLLLLLLLLAAAAAVVVVVVVNNNNNNNNMMMMMMMMVVVVVVVPPPPPPPFFFFFFFFFFFPPPPPPPRRRRRRRRRRRLLLLLLLLHHHHHHHHHHFFFFFFFFFFFFFFFFFFFFFFMMMMMMMMPPPPPPPGGGGFFFFFFFFFFFAAAAAPPPPPPPLLLLLLLLTTTTTTTSSSSSSRRRRRRRRRRRGGGGSSSSSSQQQQQQQQQQQQQQQQQQYYYYYYYYYYYYRRRRRRRRRRRAAAAALLLLLLLLTTTTTTTVVVVVVVPPPPPPPEEEEEEEEELLLLLLLLTTTTTTTQQQQQQQQQQQQQQQQQQMMMMMMMMFFFFFFFFFFFDDDDDDDDAAAAAKKKKKKKKKNNNNNNNNMMMMMMMMMMMMMMMMAAAAAAAAAACCCCCCDDDDDDDDPPPPPPPRRRRRRRRRRRHHHHHHHHHHGGGGRRRRRRRRRRRYYYYYYYYYYYYLLLLLLLLTTTTTTTVVVVVVVAAAAAAAAAAIIIIIIIIFFFFFFFFFFFRRRRRRRRRRRGGGGRRRRRRRRRRRMMMMMMMMSSSSSSMMMMMMMMKKKKKKKKKEEEEEEEEEVVVVVVVDDDDDDDDEEEEEEEEEQQQQQQQQQMMMMMMMMLLLLLLLLNNNNNNNNVVVVVVVQQQQQQQQQNNNNNNNNKKKKKKKKKNNNNNNNNSSSSSSSSSSSSYYYYYYYYYYYYFFFFFFFFFFFVVVVVVVEEEEEEEEEWWWWWWWWWWWWWWIIIIIIIIPPPPPPPNNNNNNNNNNNNNNNNVVVVVVVKKKKKKKKKTTTTTTTAAAAAVVVVVVVCCCCCCDDDDDDDDIIIIIIIIPPPPPPPPPPPPPPRRRRRRRRRRRGGGGLLLLLLLLKKKKKKKKKMMMMMMMMSSSSSSAAAAATTTTTTTFFFFFFFFFFFIIIIIIIIGGGGNNNNNNNNSSSSSSTTTTTTTAAAAAIIIIIIIIQQQQQQQQQEEEEEEEEELLLLLLLLFFFFFFFFFFFKKKKKKKKKRRRRRRRRRRRIIIIIIIISSSSSSEEEEEEEEEQQQQQQQQQFFFFFFFFFFFTTTTTTTAAAAAMMMMMMMMFFFFFFFFFFFRRRRRRRRRRRRRRRRRRRRRRKKKKKKKKKAAAAAFFFFFFFFFFFLLLLLLLLHHHHHHHHHHWWWWWWWWWWWWWWYYYYYYYYYYYYTTTTTTTGGGGEEEEEEEEEGGGGMMMMMMMMDDDDDDDDEEEEEEEEEMMMMMMMMEEEEEEEEEFFFFFFFFFFFTTTTTTTEEEEEEEEEAAAAAEEEEEEEEESSSSSSNNNNNNNNMMMMMMMMNNNNNNNNDDDDDDDDLLLLLLLLVVVVVVVSSSSSSEEEEEEEEEYYYYYYYYYYYYQQQQQQQQQQQQQQQQQQYYYYYYYYYYYYQQQQQQQQQDDDDDDDDAAAAATTTTTTTAAAAAEEEEEEEEEEEEEEEEEEEEEEEEEEEGGGGEEEEEEEEEFFFFFFFFFFFDDDDDDDDEEEEEEEEEEEEEEEEEEEEEEEEEEEEEEEEEEEEGGGGDDDDDDDDEEEEEEEEEEEEEEEEEEAAAAAAAAAAA

SEQ ID NO: 250 - protein, 3463 aa, Stylonychia lemnae
MMMMMMMMRRRRRRRRRRREEEEEEEEEIIIIIIIIVVVVVVVHHHHHHHHHHIIIIIIIIQQQQQQQQQGGGGGGGGQQQQQQQQQCCCCCCGGGGNNNNNNNNQQQQQQQQQIIIIIIIIGGGGAAAAAKKKKKKKKKFFFFFFFFFFFWWWWWWWWWWWWWWEEEEEEEEEVVVVVVVIIIIIIIISSSSSSDDDDDDDDEEEEEEEEEHHHHHHHHHHGGGGIIIIIIIIDDDDDDDDPPPPPPPTTTTTTTGGGGTTTTTTTYYYYYYYYYYYYHHHHHHHHHHGGGGDDDDDDDDSSSSSSDDDDDDDDLLLLLLLLQQQQQQQQQLLLLLLLLEEEEEEEEERRRRRRRRRRRIIIIIIIINNNNNNNNVVVVVVVYYYYYYYYYYYYYYYYYYYYYYYYNNNNNNNNEEEEEEEEEAAAAATTTTTTTGGGGGGGGRRRRRRRRRRRYYYYYYYYYYYYVVVVVVVPPPPPPPRRRRRRRRRRRAAAAAVVVVVVVLLLLLLLLMMMMMMMMDDDDDDDDLLLLLLLLEEEEEEEEEPPPPPPPGGGGTTTTTTTMMMMMMMMDDDDDDDDSSSSSSVVVVVVVRRRRRRRRRRRAAAAAGGGGPPPPPPPFFFFFFFFFFFGGGGQQQQQQQQQLLLLLLLLFFFFFFFFFFFRRRRRRRRRRRPPPPPPPDDDDDDDDNNNNNNNNFFFFFFFFFFFVVVVVVVFFFFFFFFFFFGGGGQQQQQQQQQSSSSSSGGGGAAAAAGGGGNNNNNNNNNNNNNNNNWWWWWWWWWWWWWWAAAAAKKKKKKKKKGGGGHHHHHHHHHHYYYYYYYYYYYYTTTTTTTEEEEEEEEEGGGGAAAAAEEEEEEEEELLLLLLLLIIIIIIIIDDDDDDDDSSSSSSVVVVVVVLLLLLLLLDDDDDDDDVVVVVVVVVVVVVVRRRRRRRRRRRKKKKKKKKKEEEEEEEEEAAAAAEEEEEEEEEGGGGCCCCCCDDDDDDDDCCCCCCLLLLLLLLQQQQQQQQQGGGGFFFFFFFFFFFQQQQQQQQQIIIIIIIITTTTTTTHHHHHHHHHHSSSSSSLLLLLLLLGGGGGGGGGGGGTTTTTTTGGGGSSSSSSGGGGMMMMMMMMGGGGTTTTTTTLLLLLLLLLLLLLLLLIIIIIIIISSSSSSKKKKKKKKKVVVVVVVRRRRRRRRRRREEEEEEEEEEEEEEEEEEYYYYYYYYYYYYPPPPPPPDDDDDDDDRRRRRRRRRRRIIIIIIIIMMMMMMMMAAAAATTTTTTTFFFFFFFFFFFSSSSSSVVVVVVVVVVVVVVPPPPPPPSSSSSSPPPPPPPKKKKKKKKKVVVVVVVSSSSSSDDDDDDDDTTTTTTTVVVVVVVVVVVVVVEEEEEEEEEPPPPPPPYYYYYYYYYYYYNNNNNNNNAAAAATTTTTTTLLLLLLLLSSSSSSVVVVVVVHHHHHHHHHHQQQQQQQQQLLLLLLLLVVVVVVVEEEEEEEEENNNNNNNNAAAAADDDDDDDDEEEEEEEEEVVVVVVVMMMMMMMMCCCCCCIIIIIIIIDDDDDDDDNNNNNNNNEEEEEEEEEAAAAALLLLLLLLYYYYYYYYYYYYDDDDDDDDIIIIIIIICCCCCCFFFFFFFFFFFRRRRRRRRRRRTTTTTTTLLLLLLLLKKKKKKKKKLLLLLLLLTTTTTTTTTTTTTTPPPPPPPTTTTTTTYYYYYYYYYYYYGGGGDDDDDDDDLLLLLLLLNNNNNNNNHHHHHHHHHHLLLLLLLLVVVVVVVSSSSSSAAAAAGGGGIIIIIIIISSSSSSGGGGVVVVVVVTTTTTTTCCCCCCCCCCCCLLLLLLLLRRRRRRRRRRRFFFFFFFFFFFPPPPPPPGGGGQQQQQQQQQLLLLLLLLNNNNNNNNSSSSSSDDDDDDDDLLLLLLLLRRRRRRRRRRRKKKKKKKKKLLLLLLLLAAAAAVVVVVVVNNNNNNNNLLLLLLLLIIIIIIIIPPPPPPPFFFFFFFFFFFPPPPPPPRRRRRRRRRRRLLLLLLLLHHHHHHHHHHFFFFFFFFFFFFFFFFFFFFFFMMMMMMMMTTTTTTTGGGGFFFFFFFFFFFAAAAAPPPPPPPLLLLLLLLTTTTTTTSSSSSSRRRRRRRRRRRGGGGSSSSSSQQQQQQQQQQQQQQQQQQYYYYYYYYYYYYRRRRRRRRRRRAAAAALLLLLLLLTTTTTTTVVVVVVVPPPPPPPEEEEEEEEELLLLLLLLTTTTTTTQQQQQQQQQQQQQQQQQQMMMMMMMMFFFFFFFFFFFDDDDDDDDAAAAAKKKKKKKKKNNNNNNNNMMMMMMMMMMMMMMMMCCCCCCAAAAASSSSSSDDDDDDDDPPPPPPPRRRRRRRRRRRHHHHHHHHHHGGGGRRRRRRRRRRRYYYYYYYYYYYYLLLLLLLLTTTTTTTAAAAASSSSSSAAAAALLLLLLLLFFFFFFFFFFFRRRRRRRRRRRGGGGRRRRRRRRRRRMMMMMMMMSSSSSSTTTTTTTKKKKKKKKKEEEEEEEEEVVVVVVVDDDDDDDDEEEEEEEEEQQQQQQQQQMMMMMMMMLLLLLLLLNNNNNNNNVVVVVVVQQQQQQQQQNNNNNNNNKKKKKKKKKNNNNNNNNSSSSSSSSSSSSYYYYYYYYYYYYFFFFFFFFFFFVVVVVVVEEEEEEEEEWWWWWWWWWWWWWWIIIIIIIIPPPPPPPNNNNNNNNNNNNNNNNIIIIIIIIKKKKKKKKKSSSSSSSSSSSSVVVVVVVCCCCCCDDDDDDDDIIIIIIIIPPPPPPPPPPPPPPKKKKKKKKKGGGGLLLLLLLLKKKKKKKKKMMMMMMMMAAAAAVVVVVVVTTTTTTTFFFFFFFFFFFLLLLLLLLGGGGNNNNNNNNSSSSSSTTTTTTTAAAAAIIIIIIIIQQQQQQQQQEEEEEEEEEMMMMMMMMFFFFFFFFFFFKKKKKKKKKRRRRRRRRRRRVVVVVVVGGGGEEEEEEEEEQQQQQQQQQFFFFFFFFFFFTTTTTTTAAAAAMMMMMMMMFFFFFFFFFFFRRRRRRRRRRRRRRRRRRRRRRKKKKKKKKKAAAAAFFFFFFFFFFFLLLLLLLLHHHHHHHHHHWWWWWWWWWWWWWWYYYYYYYYYYYYTTTTTTTGGGGEEEEEEEEEGGGGMMMMMMMMDDDDDDDDEEEEEEEEEMMMMMMMMEEEEEEEEEFFFFFFFFFFFTTTTTTTEEEEEEEEEAAAAAEEEEEEEEESSSSSSNNNNNNNNMMMMMMMMNNNNNNNNDDDDDDDDLLLLLLLLVVVVVVVSSSSSSEEEEEEEEEYYYYYYYYYYYYQQQQQQQQQQQQQQQQQQYYYYYYYYYYYYQQQQQQQQQDDDDDDDDAAAAATTTTTTTAAAAAEEEEEEEEEDDDDDDDDEEEEEEEEEEEEEEEEEEEEEEEEEEEMMMMMMMMDDDDDDDDEEEEEEEEEEEEEEEEEEQQQQQQQQQMMMMMMMMEEEEEEEEEE

SEQ ID NO: 251 - protein, 3475 aa, Tetrahymena pyriformis
MMMMMMMMRRRRRRRRRRREEEEEEEEEIIIIIIIIVVVVVVVHHHHHHHHHHIIIIIIIIQQQQQQQQQGGGGGGGGQQQQQQQQQCCCCCCGGGGNNNNNNNNQQQQQQQQQIIIIIIIIGGGGAAAAAKKKKKKKKKFFFFFFFFFFFWWWWWWWWWWWWWWEEEEEEEEEVVVVVVVIIIIIIIISSSSSSDDDDDDDDEEEEEEEEEHHHHHHHHHHGGGGIIIIIIIIDDDDDDDDPPPPPPPTTTTTTTGGGGTTTTTTTYYYYYYYYYYYYHHHHHHHHHHGGGGDDDDDDDDSSSSSSDDDDDDDDLLLLLLLLQQQQQQQQQLLLLLLLLEEEEEEEEERRRRRRRRRRRIIIIIIIINNNNNNNNVVVVVVVYYYYYYYYYYYYYYYYYYYYYYYYNNNNNNNNEEEEEEEEEAAAAATTTTTTTGGGGGGGGRRRRRRRRRRRYYYYYYYYYYYYVVVVVVVPPPPPPPRRRRRRRRRRRAAAAAIIIIIIIILLLLLLLLMMMMMMMMDDDDDDDDLLLLLLLLEEEEEEEEEPPPPPPPGGGGTTTTTTTMMMMMMMMDDDDDDDDSSSSSSVVVVVVVRRRRRRRRRRRAAAAAGGGGPPPPPPPFFFFFFFFFFFGGGGQQQQQQQQQLLLLLLLLFFFFFFFFFFFRRRRRRRRRRRPPPPPPPDDDDDDDDNNNNNNNNFFFFFFFFFFFVVVVVVVFFFFFFFFFFFGGGGQQQQQQQQQTTTTTTTGGGGAAAAAGGGGNNNNNNNNNNNNNNNNWWWWWWWWWWWWWWAAAAAKKKKKKKKKGGGGHHHHHHHHHHYYYYYYYYYYYYTTTTTTTEEEEEEEEEGGGGAAAAAEEEEEEEEELLLLLLLLIIIIIIIIDDDDDDDDSSSSSSVVVVVVVLLLLLLLLDDDDDDDDVVVVVVVVVVVVVVRRRRRRRRRRRKKKKKKKKKEEEEEEEEEAAAAAEEEEEEEEEGGGGCCCCCCDDDDDDDDCCCCCCLLLLLLLLQQQQQQQQQGGGGFFFFFFFFFFFQQQQQQQQQIIIIIIIITTTTTTTHHHHHHHHHHSSSSSSLLLLLLLLGGGGGGGGGGGGTTTTTTTGGGGSSSSSSGGGGMMMMMMMMGGGGTTTTTTTLLLLLLLLLLLLLLLLIIIIIIIISSSSSSKKKKKKKKKVVVVVVVRRRRRRRRRRREEEEEEEEEEEEEEEEEEYYYYYYYYYYYYPPPPPPPDDDDDDDDRRRRRRRRRRRIIIIIIIIMMMMMMMMEEEEEEEEETTTTTTTFFFFFFFFFFFSSSSSSVVVVVVVVVVVVVVPPPPPPPSSSSSSPPPPPPPKKKKKKKKKVVVVVVVSSSSSSDDDDDDDDTTTTTTTVVVVVVVVVVVVVVEEEEEEEEEPPPPPPPYYYYYYYYYYYYNNNNNNNNAAAAATTTTTTTLLLLLLLLSSSSSSVVVVVVVHHHHHHHHHHQQQQQQQQQLLLLLLLLVVVVVVVEEEEEEEEENNNNNNNNAAAAADDDDDDDDEEEEEEEEECCCCCCMMMMMMMMVVVVVVVIIIIIIIIDDDDDDDDNNNNNNNNEEEEEEEEEAAAAALLLLLLLLYYYYYYYYYYYYDDDDDDDDIIIIIIIICCCCCCFFFFFFFFFFFRRRRRRRRRRRTTTTTTTLLLLLLLLKKKKKKKKKLLLLLLLLTTTTTTTTTTTTTTPPPPPPPTTTTTTTYYYYYYYYYYYYGGGGNNNNNNNNLLLLLLLLNNNNNNNNHHHHHHHHHHLLLLLLLLVVVVVVVSSSSSSAAAAAAAAAAMMMMMMMMSSSSSSGGGGVVVVVVVTTTTTTTCCCCCCCCCCCCLLLLLLLLRRRRRRRRRRRFFFFFFFFFFFPPPPPPPGGGGQQQQQQQQQLLLLLLLLNNNNNNNNSSSSSSDDDDDDDDLLLLLLLLRRRRRRRRRRRKKKKKKKKKLLLLLLLLAAAAAVVVVVVVNNNNNNNNLLLLLLLLIIIIIIIIPPPPPPPFFFFFFFFFFFPPPPPPPRRRRRRRRRRRLLLLLLLLHHHHHHHHHHFFFFFFFFFFFFFFFFFFFFFFMMMMMMMMIIIIIIIIGGGGFFFFFFFFFFFAAAAAPPPPPPPLLLLLLLLTTTTTTTSSSSSSRRRRRRRRRRRGGGGSSSSSSQQQQQQQQQQQQQQQQQQYYYYYYYYYYYYRRRRRRRRRRRAAAAALLLLLLLLTTTTTTTVVVVVVVPPPPPPPEEEEEEEEELLLLLLLLTTTTTTTQQQQQQQQQQQQQQQQQQMMMMMMMMFFFFFFFFFFFDDDDDDDDAAAAAKKKKKKKKKNNNNNNNNMMMMMMMMMMMMMMMMCCCCCCAAAAAAAAAADDDDDDDDPPPPPPPRRRRRRRRRRRHHHHHHHHHHGGGGRRRRRRRRRRRYYYYYYYYYYYYLLLLLLLLTTTTTTTAAAAASSSSSSAAAAALLLLLLLLFFFFFFFFFFFRRRRRRRRRRRGGGGRRRRRRRRRRRMMMMMMMMSSSSSSTTTTTTTKKKKKKKKKEEEEEEEEEVVVVVVVDDDDDDDDEEEEEEEEEQQQQQQQQQMMMMMMMMLLLLLLLLNNNNNNNNVVVVVVVQQQQQQQQQNNNNNNNNKKKKKKKKKNNNNNNNNSSSSSSSSSSSSYYYYYYYYYYYYFFFFFFFFFFFVVVVVVVEEEEEEEEEWWWWWWWWWWWWWWIIIIIIIIPPPPPPPNNNNNNNNNNNNNNNNIIIIIIIIKKKKKKKKKSSSSSSSSSSSSIIIIIIIICCCCCCDDDDDDDDIIIIIIIIPPPPPPPPPPPPPPKKKKKKKKKGGGGLLLLLLLLKKKKKKKKKMMMMMMMMAAAAAVVVVVVVTTTTTTTFFFFFFFFFFFVVVVVVVGGGGNNNNNNNNSSSSSSTTTTTTTAAAAAIIIIIIIIQQQQQQQQQEEEEEEEEEMMMMMMMMFFFFFFFFFFFKKKKKKKKKRRRRRRRRRRRVVVVVVVAAAAAEEEEEEEEEQQQQQQQQQFFFFFFFFFFFTTTTTTTAAAAAMMMMMMMMFFFFFFFFFFFRRRRRRRRRRRRRRRRRRRRRRKKKKKKKKKAAAAAFFFFFFFFFFFLLLLLLLLHHHHHHHHHHWWWWWWWWWWWWWWYYYYYYYYYYYYTTTTTTTGGGGEEEEEEEEEGGGGMMMMMMMMDDDDDDDDEEEEEEEEEMMMMMMMMEEEEEEEEEFFFFFFFFFFFTTTTTTTEEEEEEEEEAAAAAEEEEEEEEESSSSSSNNNNNNNNMMMMMMMMNNNNNNNNDDDDDDDDLLLLLLLLVVVVVVVSSSSSSEEEEEEEEEYYYYYYYYYYYYQQQQQQQQQQQQQQQQQQYYYYYYYYYYYYQQQQQQQQQDDDDDDDDAAAAATTTTTTTAAAAAEEEEEEEEEEEEEEEEEEEEEEEEEEEGGGGEEEEEEEEEFFFFFFFFFFFEEEEEEEEEEEEEEEEEEEEEEEEEEEEEEEEEEEEGGGGEEEEEEEEENNNNNNNNN

SEQ ID NO: 252 - protein, 3475 aa, Tetrahymena thermophila
MMMMMMMMRRRRRRRRRRREEEEEEEEEIIIIIIIIVVVVVVVHHHHHHHHHHIIIIIIIIQQQQQQQQQGGGGGGGGQQQQQQQQQCCCCCCGGGGNNNNNNNNQQQQQQQQQIIIIIIIIGGGGAAAAAKKKKKKKKKFFFFFFFFFFFWWWWWWWWWWWWWWEEEEEEEEEVVVVVVVIIIIIIIISSSSSSDDDDDDDDEEEEEEEEEHHHHHHHHHHGGGGIIIIIIIIDDDDDDDDPPPPPPPTTTTTTTGGGGTTTTTTTYYYYYYYYYYYYHHHHHHHHHHGGGGDDDDDDDDSSSSSSDDDDDDDDLLLLLLLLQQQQQQQQQLLLLLLLLEEEEEEEEERRRRRRRRRRRIIIIIIIINNNNNNNNVVVVVVVYYYYYYYYYYYYYYYYYYYYYYYYNNNNNNNNEEEEEEEEEAAAAATTTTTTTGGGGGGGGRRRRRRRRRRRYYYYYYYYYYYYVVVVVVVPPPPPPPRRRRRRRRRRRAAAAAIIIIIIIILLLLLLLLMMMMMMMMDDDDDDDDLLLLLLLLEEEEEEEEEPPPPPPPGGGGTTTTTTTMMMMMMMMDDDDDDDDSSSSSSVVVVVVVRRRRRRRRRRRAAAAAGGGGPPPPPPPFFFFFFFFFFFGGGGQQQQQQQQQLLLLLLLLFFFFFFFFFFFRRRRRRRRRRRPPPPPPPDDDDDDDDNNNNNNNNFFFFFFFFFFFVVVVVVVFFFFFFFFFFFGGGGQQQQQQQQQTTTTTTTGGGGAAAAAGGGGNNNNNNNNNNNNNNNNWWWWWWWWWWWWWWAAAAAKKKKKKKKKGGGGHHHHHHHHHHYYYYYYYYYYYYTTTTTTTEEEEEEEEEGGGGAAAAAEEEEEEEEELLLLLLLLIIIIIIIIDDDDDDDDSSSSSSVVVVVVVLLLLLLLLDDDDDDDDVVVVVVVVVVVVVVRRRRRRRRRRRKKKKKKKKKEEEEEEEEEAAAAAEEEEEEEEEGGGGCCCCCCDDDDDDDDCCCCCCLLLLLLLLQQQQQQQQQGGGGFFFFFFFFFFFQQQQQQQQQIIIIIIIITTTTTTTHHHHHHHHHHSSSSSSLLLLLLLLGGGGGGGGGGGGTTTTTTTGGGGSSSSSSGGGGMMMMMMMMGGGGTTTTTTTLLLLLLLLLLLLLLLLIIIIIIIISSSSSSKKKKKKKKKVVVVVVVRRRRRRRRRRREEEEEEEEEEEEEEEEEEYYYYYYYYYYYYPPPPPPPDDDDDDDDRRRRRRRRRRRIIIIIIIIMMMMMMMMEEEEEEEEETTTTTTTFFFFFFFFFFFSSSSSSVVVVVVVVVVVVVVPPPPPPPSSSSSSPPPPPPPKKKKKKKKKVVVVVVVSSSSSSDDDDDDDDTTTTTTTVVVVVVVVVVVVVVEEEEEEEEEPPPPPPPYYYYYYYYYYYYNNNNNNNNAAAAATTTTTTTLLLLLLLLSSSSSSVVVVVVVHHHHHHHHHHQQQQQQQQQLLLLLLLLVVVVVVVEEEEEEEEENNNNNNNNAAAAADDDDDDDDEEEEEEEEECCCCCCMMMMMMMMVVVVVVVIIIIIIIIDDDDDDDDNNNNNNNNEEEEEEEEEAAAAALLLLLLLLYYYYYYYYYYYYDDDDDDDDIIIIIIIICCCCCCFFFFFFFFFFFRRRRRRRRRRRTTTTTTTLLLLLLLLKKKKKKKKKLLLLLLLLTTTTTTTTTTTTTTPPPPPPPTTTTTTTYYYYYYYYYYYYGGGGDDDDDDDDLLLLLLLLNNNNNNNNHHHHHHHHHHLLLLLLLLVVVVVVVSSSSSSAAAAAAAAAAMMMMMMMMSSSSSSGGGGVVVVVVVTTTTTTTCCCCCCCCCCCCLLLLLLLLRRRRRRRRRRRFFFFFFFFFFFPPPPPPPGGGGQQQQQQQQQLLLLLLLLNNNNNNNNSSSSSSDDDDDDDDLLLLLLLLRRRRRRRRRRRKKKKKKKKKLLLLLLLLAAAAAVVVVVVVNNNNNNNNLLLLLLLLIIIIIIIIPPPPPPPFFFFFFFFFFFPPPPPPPRRRRRRRRRRRLLLLLLLLHHHHHHHHHHFFFFFFFFFFFFFFFFFFFFFFMMMMMMMMIIIIIIIIGGGGFFFFFFFFFFFAAAAAPPPPPPPLLLLLLLLTTTTTTTSSSSSSRRRRRRRRRRRGGGGSSSSSSQQQQQQQQQQQQQQQQQQYYYYYYYYYYYYRRRRRRRRRRRAAAAALLLLLLLLTTTTTTTVVVVVVVPPPPPPPEEEEEEEEELLLLLLLLTTTTTTTQQQQQQQQQQQQQQQQQQMMMMMMMMFFFFFFFFFFFDDDDDDDDAAAAAKKKKKKKKKNNNNNNNNMMMMMMMMMMMMMMMMCCCCCCAAAAAAAAAADDDDDDDDPPPPPPPRRRRRRRRRRRHHHHHHHHHHGGGGRRRRRRRRRRRYYYYYYYYYYYYLLLLLLLLTTTTTTTAAAAASSSSSSAAAAALLLLLLLLFFFFFFFFFFFRRRRRRRRRRRGGGGRRRRRRRRRRRMMMMMMMMSSSSSSTTTTTTTKKKKKKKKKEEEEEEEEEVVVVVVVDDDDDDDDEEEEEEEEEQQQQQQQQQMMMMMMMMLLLLLLLLNNNNNNNNVVVVVVVQQQQQQQQQNNNNNNNNKKKKKKKKKNNNNNNNNSSSSSSSSSSSSYYYYYYYYYYYYFFFFFFFFFFFVVVVVVVEEEEEEEEEWWWWWWWWWWWWWWIIIIIIIIPPPPPPPNNNNNNNNNNNNNNNNIIIIIIIIKKKKKKKKKSSSSSSSSSSSSIIIIIIIICCCCCCDDDDDDDDIIIIIIIIPPPPPPPPPPPPPPKKKKKKKKKGGGGLLLLLLLLKKKKKKKKKMMMMMMMMAAAAAVVVVVVVTTTTTTTFFFFFFFFFFFVVVVVVVGGGGNNNNNNNNSSSSSSTTTTTTTAAAAAIIIIIIIIQQQQQQQQQEEEEEEEEEMMMMMMMMFFFFFFFFFFFKKKKKKKKKRRRRRRRRRRRVVVVVVVAAAAAEEEEEEEEEQQQQQQQQQFFFFFFFFFFFTTTTTTTAAAAAMMMMMMMMFFFFFFFFFFFRRRRRRRRRRRRRRRRRRRRRRKKKKKKKKKAAAAAFFFFFFFFFFFLLLLLLLLHHHHHHHHHHWWWWWWWWWWWWWWYYYYYYYYYYYYTTTTTTTGGGGEEEEEEEEEGGGGMMMMMMMMDDDDDDDDEEEEEEEEEMMMMMMMMEEEEEEEEEFFFFFFFFFFFTTTTTTTEEEEEEEEEAAAAAEEEEEEEEESSSSSSNNNNNNNNMMMMMMMMNNNNNNNNDDDDDDDDLLLLLLLLVVVVVVVSSSSSSEEEEEEEEEYYYYYYYYYYYYQQQQQQQQQQQQQQQQQQYYYYYYYYYYYYQQQQQQQQQDDDDDDDDAAAAATTTTTTTAAAAAEEEEEEEEEEEEEEEEEEEEEEEEEEEGGGGEEEEEEEEEFFFFFFFFFFFEEEEEEEEEEEEEEEEEEEEEEEEEEEEEEEEEEEEGGGGEEEEEEEEENNNNNNNNN

SEQ ID NO: 253 - protein, 3466 aa, Thalassiosira weisflogii
MMMMMMMMRRRRRRRRRRREEEEEEEEEIIIIIIIIVVVVVVVHHHHHHHHHHIIIIIIIIQQQQQQQQQGGGGGGGGQQQQQQQQQCCCCCCGGGGNNNNNNNNQQQQQQQQQIIIIIIIIGGGGAAAAAKKKKKKKKKFFFFFFFFFFFWWWWWWWWWWWWWWEEEEEEEEEVVVVVVVMMMMMMMMSSSSSSDDDDDDDDEEEEEEEEEHHHHHHHHHHGGGGVVVVVVVDDDDDDDDPPPPPPPTTTTTTTGGGGTTTTTTTYYYYYYYYYYYYHHHHHHHHHHGGGGDDDDDDDDSSSSSSDDDDDDDDLLLLLLLLQQQQQQQQQLLLLLLLLEEEEEEEEERRRRRRRRRRRIIIIIIIINNNNNNNNVVVVVVVYYYYYYYYYYYYFFFFFFFFFFFNNNNNNNNEEEEEEEEEAAAAATTTTTTTGGGGGGGGRRRRRRRRRRRYYYYYYYYYYYYVVVVVVVPPPPPPPRRRRRRRRRRRAAAAAIIIIIIIILLLLLLLLMMMMMMMMDDDDDDDDLLLLLLLLEEEEEEEEEPPPPPPPGGGGTTTTTTTMMMMMMMMDDDDDDDDSSSSSSVVVVVVVRRRRRRRRRRRAAAAAGGGGPPPPPPPFFFFFFFFFFFGGGGQQQQQQQQQLLLLLLLLFFFFFFFFFFFRRRRRRRRRRRPPPPPPPDDDDDDDDNNNNNNNNFFFFFFFFFFFVVVVVVVFFFFFFFFFFFGGGGQQQQQQQQQTTTTTTTGGGGAAAAAGGGGNNNNNNNNNNNNNNNNWWWWWWWWWWWWWWAAAAAKKKKKKKKKGGGGHHHHHHHHHHYYYYYYYYYYYYTTTTTTTEEEEEEEEEGGGGAAAAAEEEEEEEEELLLLLLLLIIIIIIIIDDDDDDDDSSSSSSVVVVVVVLLLLLLLLDDDDDDDDVVVVVVVVVVVVVVRRRRRRRRRRRKKKKKKKKKEEEEEEEEEAAAAAEEEEEEEEESSSSSSCCCCCCDDDDDDDDCCCCCCMMMMMMMMQQQQQQQQQGGGGFFFFFFFFFFFQQQQQQQQQLLLLLLLLTTTTTTTHHHHHHHHHHSSSSSSMMMMMMMMGGGGGGGGGGGGTTTTTTTGGGGAAAAAGGGGMMMMMMMMGGGGTTTTTTTLLLLLLLLLLLLLLLLIIIIIIIISSSSSSKKKKKKKKKIIIIIIIIRRRRRRRRRRREEEEEEEEEEEEEEEEEEYYYYYYYYYYYYPPPPPPPDDDDDDDDRRRRRRRRRRRVVVVVVVMMMMMMMMSSSSSSTTTTTTTYYYYYYYYYYYYSSSSSSVVVVVVVIIIIIIIIPPPPPPPSSSSSSPPPPPPPKKKKKKKKKVVVVVVVSSSSSSDDDDDDDDTTTTTTTVVVVVVVVVVVVVVEEEEEEEEEPPPPPPPYYYYYYYYYYYYNNNNNNNNAAAAATTTTTTTLLLLLLLLSSSSSSVVVVVVVHHHHHHHHHHQQQQQQQQQLLLLLLLLVVVVVVVEEEEEEEEENNNNNNNNAAAAADDDDDDDDQQQQQQQQQCCCCCCFFFFFFFFFFFAAAAALLLLLLLLDDDDDDDDNNNNNNNNEEEEEEEEEAAAAALLLLLLLLYYYYYYYYYYYYDDDDDDDDIIIIIIIICCCCCCFFFFFFFFFFFRRRRRRRRRRRTTTTTTTLLLLLLLLKKKKKKKKKLLLLLLLLTTTTTTTTTTTTTTPPPPPPPTTTTTTTYYYYYYYYYYYYGGGGDDDDDDDDLLLLLLLLNNNNNNNNHHHHHHHHHHLLLLLLLLIIIIIIIIAAAAAAAAAAAAAAAVVVVVVVCCCCCCGGGGTTTTTTTTTTTTTTCCCCCCCCCCCCLLLLLLLLRRRRRRRRRRRFFFFFFFFFFFPPPPPPPGGGGQQQQQQQQQLLLLLLLLNNNNNNNNCCCCCCDDDDDDDDLLLLLLLLRRRRRRRRRRRKKKKKKKKKLLLLLLLLAAAAAVVVVVVVNNNNNNNNMMMMMMMMVVVVVVVPPPPPPPFFFFFFFFFFFPPPPPPPRRRRRRRRRRRLLLLLLLLHHHHHHHHHHFFFFFFFFFFFFFFFFFFFFFFMMMMMMMMVVVVVVVGGGGYYYYYYYYYYYYAAAAAPPPPPPPLLLLLLLLTTTTTTTSSSSSSRRRRRRRRRRRGGGGSSSSSSQQQQQQQQQQQQQQQQQQYYYYYYYYYYYYRRRRRRRRRRRAAAAALLLLLLLLTTTTTTTVVVVVVVPPPPPPPEEEEEEEEELLLLLLLLTTTTTTTQQQQQQQQQQQQQQQQQQCCCCCCFFFFFFFFFFFDDDDDDDDAAAAAKKKKKKKKKNNNNNNNNMMMMMMMMMMMMMMMMCCCCCCAAAAAAAAAADDDDDDDDPPPPPPPRRRRRRRRRRRHHHHHHHHHHGGGGRRRRRRRRRRRYYYYYYYYYYYYLLLLLLLLTTTTTTTCCCCCCAAAAAVVVVVVVLLLLLLLLFFFFFFFFFFFRRRRRRRRRRRGGGGRRRRRRRRRRRMMMMMMMMSSSSSSSSSSSSKKKKKKKKKEEEEEEEEEVVVVVVVDDDDDDDDEEEEEEEEEQQQQQQQQQMMMMMMMMLLLLLLLLNNNNNNNNVVVVVVVVVVVVVVNNNNNNNNKKKKKKKKKSSSSSSSSSSSSSSSSSSYYYYYYYYYYYYFFFFFFFFFFFVVVVVVVEEEEEEEEEWWWWWWWWWWWWWWIIIIIIIIPPPPPPPNNNNNNNNNNNNNNNNVVVVVVVKKKKKKKKKAAAAASSSSSSIIIIIIIICCCCCCDDDDDDDDIIIIIIIIPPPPPPPPPPPPPPKKKKKKKKKGGGGLLLLLLLLKKKKKKKKKMMMMMMMMAAAAATTTTTTTTTTTTTTFFFFFFFFFFFVVVVVVVGGGGNNNNNNNNTTTTTTTTTTTTTTAAAAAVVVVVVVQQQQQQQQQEEEEEEEEETTTTTTTWWWWWWWWWWWWWWKKKKKKKKKRRRRRRRRRRRVVVVVVVAAAAAEEEEEEEEEQQQQQQQQQFFFFFFFFFFFTTTTTTTVVVVVVVMMMMMMMMFFFFFFFFFFFRRRRRRRRRRRRRRRRRRRRRRKKKKKKKKKAAAAAFFFFFFFFFFFLLLLLLLLHHHHHHHHHHWWWWWWWWWWWWWWYYYYYYYYYYYYTTTTTTTGGGGEEEEEEEEEGGGGMMMMMMMMDDDDDDDDEEEEEEEEEMMMMMMMMEEEEEEEEEFFFFFFFFFFFTTTTTTTEEEEEEEEEAAAAAEEEEEEEEESSSSSSNNNNNNNNMMMMMMMMNNNNNNNNDDDDDDDDLLLLLLLLVVVVVVVSSSSSSEEEEEEEEEYYYYYYYYYYYYQQQQQQQQQQQQQQQQQQYYYYYYYYYYYYQQQQQQQQQDDDDDDDDAAAAATTTTTTTAAAAADDDDDDDDEEEEEEEEEEEEEEEEEEGGGGEEEEEEEEEFFFFFFFFFFFDDDDDDDDEEEEEEEEEDDDDDDDDEEEEEEEEEMMMMMMMMEEEEEEEEEGGGGG

SEQ ID NO: 254 - protein, 3508 aa, Toxoplasma gondii
MMMMMMMMRRRRRRRRRRREEEEEEEEEIIIIIIIIVVVVVVVHHHHHHHHHHVVVVVVVQQQQQQQQQGGGGGGGGQQQQQQQQQCCCCCCGGGGNNNNNNNNQQQQQQQQQIIIIIIIIGGGGAAAAAKKKKKKKKKFFFFFFFFFFFWWWWWWWWWWWWWWEEEEEEEEEVVVVVVVIIIIIIIISSSSSSDDDDDDDDEEEEEEEEEHHHHHHHHHHGGGGIIIIIIIIDDDDDDDDPPPPPPPTTTTTTTGGGGTTTTTTTYYYYYYYYYYYYCCCCCCGGGGDDDDDDDDSSSSSSDDDDDDDDLLLLLLLLQQQQQQQQQLLLLLLLLEEEEEEEEERRRRRRRRRRRIIIIIIIINNNNNNNNVVVVVVVFFFFFFFFFFFYYYYYYYYYYYYNNNNNNNNEEEEEEEEEAAAAATTTTTTTGGGGGGGGRRRRRRRRRRRFFFFFFFFFFFVVVVVVVPPPPPPPRRRRRRRRRRRAAAAAIIIIIIIILLLLLLLLMMMMMMMMDDDDDDDDLLLLLLLLEEEEEEEEEPPPPPPPGGGGTTTTTTTMMMMMMMMDDDDDDDDSSSSSSVVVVVVVRRRRRRRRRRRAAAAAGGGGPPPPPPPFFFFFFFFFFFGGGGQQQQQQQQQLLLLLLLLFFFFFFFFFFFRRRRRRRRRRRPPPPPPPDDDDDDDDNNNNNNNNFFFFFFFFFFFVVVVVVVFFFFFFFFFFFGGGGQQQQQQQQQTTTTTTTGGGGAAAAAGGGGNNNNNNNNNNNNNNNNWWWWWWWWWWWWWWAAAAAKKKKKKKKKGGGGHHHHHHHHHHYYYYYYYYYYYYTTTTTTTEEEEEEEEEGGGGAAAAAEEEEEEEEELLLLLLLLIIIIIIIIDDDDDDDDSSSSSSVVVVVVVLLLLLLLLDDDDDDDDVVVVVVVVVVVVVVRRRRRRRRRRRKKKKKKKKKEEEEEEEEEAAAAAEEEEEEEEEGGGGCCCCCCDDDDDDDDCCCCCCLLLLLLLLQQQQQQQQQGGGGFFFFFFFFFFFQQQQQQQQQIIIIIIIITTTTTTTHHHHHHHHHHSSSSSSLLLLLLLLGGGGGGGGGGGGTTTTTTTGGGGSSSSSSGGGGMMMMMMMMGGGGTTTTTTTLLLLLLLLLLLLLLLLIIIIIIIISSSSSSKKKKKKKKKVVVVVVVRRRRRRRRRRREEEEEEEEEEEEEEEEEEYYYYYYYYYYYYPPPPPPPDDDDDDDDRRRRRRRRRRRIIIIIIIIMMMMMMMMEEEEEEEEETTTTTTTFFFFFFFFFFFSSSSSSVVVVVVVFFFFFFFFFFFPPPPPPPSSSSSSPPPPPPPKKKKKKKKKVVVVVVVSSSSSSDDDDDDDDTTTTTTTVVVVVVVVVVVVVVEEEEEEEEEPPPPPPPYYYYYYYYYYYYNNNNNNNNAAAAATTTTTTTLLLLLLLLSSSSSSVVVVVVVHHHHHHHHHHQQQQQQQQQLLLLLLLLVVVVVVVEEEEEEEEENNNNNNNNAAAAADDDDDDDDEEEEEEEEEVVVVVVVQQQQQQQQQVVVVVVVIIIIIIIIDDDDDDDDNNNNNNNNEEEEEEEEEAAAAALLLLLLLLYYYYYYYYYYYYDDDDDDDDIIIIIIIICCCCCCFFFFFFFFFFFRRRRRRRRRRRTTTTTTTLLLLLLLLKKKKKKKKKLLLLLLLLTTTTTTTTTTTTTTPPPPPPPTTTTTTTYYYYYYYYYYYYGGGGDDDDDDDDLLLLLLLLNNNNNNNNHHHHHHHHHHLLLLLLLLVVVVVVVSSSSSSAAAAAAAAAAMMMMMMMMSSSSSSGGGGVVVVVVVTTTTTTTCCCCCCCCCCCCLLLLLLLLRRRRRRRRRRRFFFFFFFFFFFPPPPPPPGGGGQQQQQQQQQLLLLLLLLNNNNNNNNSSSSSSDDDDDDDDLLLLLLLLRRRRRRRRRRRKKKKKKKKKLLLLLLLLAAAAAVVVVVVVNNNNNNNNLLLLLLLLVVVVVVVPPPPPPPFFFFFFFFFFFPPPPPPPRRRRRRRRRRRLLLLLLLLHHHHHHHHHHFFFFFFFFFFFFFFFFFFFFFFLLLLLLLLIIIIIIIIGGGGFFFFFFFFFFFAAAAAPPPPPPPLLLLLLLLTTTTTTTSSSSSSRRRRRRRRRRRGGGGSSSSSSQQQQQQQQQQQQQQQQQQYYYYYYYYYYYYRRRRRRRRRRRAAAAALLLLLLLLSSSSSSVVVVVVVPPPPPPPEEEEEEEEELLLLLLLLTTTTTTTQQQQQQQQQQQQQQQQQQMMMMMMMMFFFFFFFFFFFDDDDDDDDAAAAAKKKKKKKKKNNNNNNNNMMMMMMMMMMMMMMMMCCCCCCAAAAASSSSSSDDDDDDDDPPPPPPPRRRRRRRRRRRHHHHHHHHHHGGGGRRRRRRRRRRRYYYYYYYYYYYYLLLLLLLLTTTTTTTAAAAASSSSSSAAAAAMMMMMMMMFFFFFFFFFFFRRRRRRRRRRRGGGGRRRRRRRRRRRMMMMMMMMSSSSSSTTTTTTTKKKKKKKKKEEEEEEEEEVVVVVVVDDDDDDDDEEEEEEEEEQQQQQQQQQMMMMMMMMLLLLLLLLNNNNNNNNVVVVVVVQQQQQQQQQNNNNNNNNKKKKKKKKKNNNNNNNNSSSSSSSSSSSSYYYYYYYYYYYYFFFFFFFFFFFVVVVVVVEEEEEEEEEWWWWWWWWWWWWWWIIIIIIIIPPPPPPPNNNNNNNNNNNNNNNNMMMMMMMMKKKKKKKKKSSSSSSSSSSSSVVVVVVVCCCCCCDDDDDDDDIIIIIIIIPPPPPPPPPPPPPPKKKKKKKKKGGGGLLLLLLLLKKKKKKKKKMMMMMMMMSSSSSSVVVVVVVTTTTTTTFFFFFFFFFFFVVVVVVVGGGGNNNNNNNNSSSSSSTTTTTTTAAAAAIIIIIIIIQQQQQQQQQEEEEEEEEEMMMMMMMMFFFFFFFFFFFKKKKKKKKKRRRRRRRRRRRVVVVVVVSSSSSSDDDDDDDDQQQQQQQQQFFFFFFFFFFFTTTTTTTAAAAAMMMMMMMMFFFFFFFFFFFRRRRRRRRRRRRRRRRRRRRRRKKKKKKKKKAAAAAFFFFFFFFFFFLLLLLLLLHHHHHHHHHHWWWWWWWWWWWWWWYYYYYYYYYYYYTTTTTTTGGGGEEEEEEEEEGGGGMMMMMMMMDDDDDDDDEEEEEEEEEMMMMMMMMEEEEEEEEEFFFFFFFFFFFTTTTTTTEEEEEEEEEAAAAAEEEEEEEEESSSSSSNNNNNNNNMMMMMMMMNNNNNNNNDDDDDDDDLLLLLLLLVVVVVVVSSSSSSEEEEEEEEEYYYYYYYYYYYYQQQQQQQQQQQQQQQQQQYYYYYYYYYYYYQQQQQQQQQDDDDDDDDAAAAATTTTTTTAAAAAEEEEEEEEEEEEEEEEEEEEEEEEEEEGGGGEEEEEEEEEFFFFFFFFFFFDDDDDDDDEEEEEEEEEEEEEEEEEEEEEEEEEEEGGGGEEEEEEEEEMMMMMMMMGGGGAAAAAEEEEEEEEEEEEEEEEEEGGGGAAAAAA

SEQ ID NO: 255 - protein, 3479 aa, Trypanosoma brucei
MMMMMMMMRRRRRRRRRRREEEEEEEEEIIIIIIIIVVVVVVVCCCCCCVVVVVVVQQQQQQQQQAAAAAGGGGQQQQQQQQQCCCCCCGGGGNNNNNNNNQQQQQQQQQIIIIIIIIGGGGSSSSSSKKKKKKKKKFFFFFFFFFFFWWWWWWWWWWWWWWEEEEEEEEEVVVVVVVIIIIIIIISSSSSSDDDDDDDDEEEEEEEEEHHHHHHHHHHGGGGVVVVVVVDDDDDDDDPPPPPPPTTTTTTTGGGGTTTTTTTYYYYYYYYYYYYQQQQQQQQQGGGGDDDDDDDDSSSSSSDDDDDDDDLLLLLLLLQQQQQQQQQLLLLLLLLEEEEEEEEERRRRRRRRRRRIIIIIIIINNNNNNNNVVVVVVVYYYYYYYYYYYYFFFFFFFFFFFDDDDDDDDEEEEEEEEEAAAAATTTTTTTGGGGGGGGRRRRRRRRRRRYYYYYYYYYYYYVVVVVVVPPPPPPPRRRRRRRRRRRSSSSSSVVVVVVVLLLLLLLLIIIIIIIIDDDDDDDDLLLLLLLLEEEEEEEEEPPPPPPPGGGGTTTTTTTMMMMMMMMDDDDDDDDSSSSSSVVVVVVVRRRRRRRRRRRAAAAAGGGGPPPPPPPYYYYYYYYYYYYGGGGQQQQQQQQQIIIIIIIIFFFFFFFFFFFRRRRRRRRRRRPPPPPPPDDDDDDDDNNNNNNNNFFFFFFFFFFFIIIIIIIIFFFFFFFFFFFGGGGQQQQQQQQQSSSSSSGGGGAAAAAGGGGNNNNNNNNNNNNNNNNWWWWWWWWWWWWWWAAAAAKKKKKKKKKGGGGHHHHHHHHHHYYYYYYYYYYYYTTTTTTTEEEEEEEEEGGGGAAAAAEEEEEEEEELLLLLLLLIIIIIIIIDDDDDDDDSSSSSSVVVVVVVLLLLLLLLDDDDDDDDVVVVVVVCCCCCCCCCCCCKKKKKKKKKEEEEEEEEEAAAAAEEEEEEEEESSSSSSCCCCCCDDDDDDDDCCCCCCLLLLLLLLQQQQQQQQQGGGGFFFFFFFFFFFQQQQQQQQQIIIIIIIICCCCCCHHHHHHHHHHSSSSSSLLLLLLLLGGGGGGGGGGGGTTTTTTTGGGGSSSSSSGGGGMMMMMMMMGGGGTTTTTTTLLLLLLLLLLLLLLLLIIIIIIIISSSSSSKKKKKKKKKLLLLLLLLRRRRRRRRRRREEEEEEEEEQQQQQQQQQYYYYYYYYYYYYPPPPPPPDDDDDDDDRRRRRRRRRRRIIIIIIIIMMMMMMMMMMMMMMMMTTTTTTTFFFFFFFFFFFSSSSSSIIIIIIIIIIIIIIIIPPPPPPPSSSSSSPPPPPPPKKKKKKKKKVVVVVVVSSSSSSDDDDDDDDTTTTTTTVVVVVVVVVVVVVVEEEEEEEEEPPPPPPPYYYYYYYYYYYYNNNNNNNNTTTTTTTTTTTTTTLLLLLLLLSSSSSSVVVVVVVHHHHHHHHHHQQQQQQQQQLLLLLLLLVVVVVVVEEEEEEEEENNNNNNNNSSSSSSDDDDDDDDEEEEEEEEESSSSSSMMMMMMMMCCCCCCIIIIIIIIDDDDDDDDNNNNNNNNEEEEEEEEEAAAAALLLLLLLLYYYYYYYYYYYYDDDDDDDDIIIIIIIICCCCCCFFFFFFFFFFFRRRRRRRRRRRTTTTTTTLLLLLLLLKKKKKKKKKLLLLLLLLTTTTTTTTTTTTTTPPPPPPPTTTTTTTFFFFFFFFFFFGGGGDDDDDDDDLLLLLLLLNNNNNNNNHHHHHHHHHHLLLLLLLLVVVVVVVSSSSSSAAAAAVVVVVVVVVVVVVVSSSSSSGGGGVVVVVVVTTTTTTTCCCCCCCCCCCCLLLLLLLLRRRRRRRRRRRFFFFFFFFFFFPPPPPPPGGGGQQQQQQQQQLLLLLLLLNNNNNNNNSSSSSSDDDDDDDDLLLLLLLLRRRRRRRRRRRKKKKKKKKKLLLLLLLLAAAAAVVVVVVVNNNNNNNNLLLLLLLLVVVVVVVPPPPPPPFFFFFFFFFFFPPPPPPPRRRRRRRRRRRLLLLLLLLHHHHHHHHHHFFFFFFFFFFFFFFFFFFFFFFMMMMMMMMMMMMMMMMGGGGFFFFFFFFFFFAAAAAPPPPPPPLLLLLLLLTTTTTTTSSSSSSRRRRRRRRRRRGGGGSSSSSSQQQQQQQQQQQQQQQQQQYYYYYYYYYYYYRRRRRRRRRRRGGGGLLLLLLLLSSSSSSVVVVVVVPPPPPPPEEEEEEEEELLLLLLLLTTTTTTTQQQQQQQQQQQQQQQQQQMMMMMMMMFFFFFFFFFFFDDDDDDDDAAAAAKKKKKKKKKNNNNNNNNMMMMMMMMMMMMMMMMQQQQQQQQQAAAAAAAAAADDDDDDDDPPPPPPPRRRRRRRRRRRHHHHHHHHHHGGGGRRRRRRRRRRRYYYYYYYYYYYYLLLLLLLLTTTTTTTAAAAASSSSSSAAAAALLLLLLLLFFFFFFFFFFFRRRRRRRRRRRGGGGRRRRRRRRRRRMMMMMMMMSSSSSSTTTTTTTKKKKKKKKKEEEEEEEEEVVVVVVVDDDDDDDDEEEEEEEEEQQQQQQQQQMMMMMMMMLLLLLLLLNNNNNNNNVVVVVVVQQQQQQQQQNNNNNNNNKKKKKKKKKNNNNNNNNSSSSSSSSSSSSYYYYYYYYYYYYFFFFFFFFFFFIIIIIIIIEEEEEEEEEWWWWWWWWWWWWWWIIIIIIIIPPPPPPPNNNNNNNNNNNNNNNNIIIIIIIIKKKKKKKKKSSSSSSSSSSSSVVVVVVVCCCCCCDDDDDDDDIIIIIIIIPPPPPPPPPPPPPPKKKKKKKKKGGGGLLLLLLLLKKKKKKKKKMMMMMMMMAAAAAVVVVVVVTTTTTTTFFFFFFFFFFFIIIIIIIIGGGGNNNNNNNNNNNNNNNNTTTTTTTCCCCCCIIIIIIIIQQQQQQQQQEEEEEEEEEMMMMMMMMFFFFFFFFFFFRRRRRRRRRRRRRRRRRRRRRRVVVVVVVGGGGEEEEEEEEEQQQQQQQQQFFFFFFFFFFFTTTTTTTLLLLLLLLMMMMMMMMFFFFFFFFFFFRRRRRRRRRRRRRRRRRRRRRRKKKKKKKKKAAAAAFFFFFFFFFFFLLLLLLLLHHHHHHHHHHWWWWWWWWWWWWWWYYYYYYYYYYYYTTTTTTTGGGGEEEEEEEEEGGGGMMMMMMMMDDDDDDDDEEEEEEEEEMMMMMMMMEEEEEEEEEFFFFFFFFFFFTTTTTTTEEEEEEEEEAAAAAEEEEEEEEESSSSSSNNNNNNNNMMMMMMMMNNNNNNNNDDDDDDDDLLLLLLLLVVVVVVVSSSSSSEEEEEEEEEYYYYYYYYYYYYQQQQQQQQQQQQQQQQQQYYYYYYYYYYYYQQQQQQQQQDDDDDDDDAAAAATTTTTTTIIIIIIIIEEEEEEEEEEEEEEEEEEEEEEEEEEEGGGGEEEEEEEEEFFFFFFFFFFFDDDDDDDDEEEEEEEEEEEEEEEEEEEEEEEEEEEQQQQQQQQQYYYYYYYYYYYYY

SEQ ID NO: 256 - protein, 3471 aa, Trypanosoma cruzi
MMMMMMMMRRRRRRRRRRREEEEEEEEEIIIIIIIIVVVVVVVCCCCCCVVVVVVVQQQQQQQQQAAAAAGGGGQQQQQQQQQCCCCCCGGGGNNNNNNNNQQQQQQQQQIIIIIIIIGGGGSSSSSSKKKKKKKKKFFFFFFFFFFFWWWWWWWWWWWWWWEEEEEEEEEVVVVVVVIIIIIIIISSSSSSDDDDDDDDEEEEEEEEEHHHHHHHHHHGGGGVVVVVVVDDDDDDDDPPPPPPPTTTTTTTGGGGTTTTTTTYYYYYYYYYYYYQQQQQQQQQGGGGDDDDDDDDSSSSSSDDDDDDDDLLLLLLLLQQQQQQQQQLLLLLLLLEEEEEEEEERRRRRRRRRRRIIIIIIIINNNNNNNNVVVVVVVYYYYYYYYYYYYFFFFFFFFFFFDDDDDDDDEEEEEEEEEAAAAATTTTTTTGGGGGGGGRRRRRRRRRRRYYYYYYYYYYYYVVVVVVVPPPPPPPRRRRRRRRRRRAAAAAVVVVVVVLLLLLLLLIIIIIIIIDDDDDDDDLLLLLLLLEEEEEEEEEPPPPPPPGGGGTTTTTTTMMMMMMMMDDDDDDDDSSSSSSVVVVVVVRRRRRRRRRRRAAAAAGGGGPPPPPPPYYYYYYYYYYYYGGGGQQQQQQQQQIIIIIIIIFFFFFFFFFFFRRRRRRRRRRRPPPPPPPDDDDDDDDNNNNNNNNFFFFFFFFFFFIIIIIIIIFFFFFFFFFFFGGGGQQQQQQQQQSSSSSSGGGGAAAAAGGGGNNNNNNNNNNNNNNNNWWWWWWWWWWWWWWAAAAAKKKKKKKKKGGGGHHHHHHHHHHYYYYYYYYYYYYTTTTTTTEEEEEEEEEGGGGAAAAAEEEEEEEEELLLLLLLLIIIIIIIIDDDDDDDDSSSSSSVVVVVVVLLLLLLLLDDDDDDDDVVVVVVVCCCCCCRRRRRRRRRRRKKKKKKKKKEEEEEEEEEAAAAAEEEEEEEEESSSSSSCCCCCCDDDDDDDDCCCCCCLLLLLLLLQQQQQQQQQGGGGFFFFFFFFFFFQQQQQQQQQIIIIIIIICCCCCCHHHHHHHHHHSSSSSSLLLLLLLLGGGGGGGGGGGGTTTTTTTGGGGSSSSSSGGGGMMMMMMMMGGGGTTTTTTTLLLLLLLLLLLLLLLLIIIIIIIISSSSSSKKKKKKKKKLLLLLLLLRRRRRRRRRRREEEEEEEEEEEEEEEEEEYYYYYYYYYYYYPPPPPPPDDDDDDDDRRRRRRRRRRRIIIIIIIIMMMMMMMMMMMMMMMMTTTTTTTFFFFFFFFFFFSSSSSSIIIIIIIIIIIIIIIIPPPPPPPSSSSSSPPPPPPPKKKKKKKKKVVVVVVVSSSSSSDDDDDDDDTTTTTTTVVVVVVVVVVVVVVEEEEEEEEEPPPPPPPYYYYYYYYYYYYNNNNNNNNTTTTTTTTTTTTTTLLLLLLLLSSSSSSVVVVVVVHHHHHHHHHHQQQQQQQQQLLLLLLLLVVVVVVVEEEEEEEEENNNNNNNNSSSSSSDDDDDDDDEEEEEEEEESSSSSSMMMMMMMMCCCCCCIIIIIIIIDDDDDDDDNNNNNNNNEEEEEEEEEAAAAALLLLLLLLYYYYYYYYYYYYDDDDDDDDIIIIIIIICCCCCCFFFFFFFFFFFRRRRRRRRRRRTTTTTTTLLLLLLLLKKKKKKKKKLLLLLLLLTTTTTTTTTTTTTTPPPPPPPTTTTTTTFFFFFFFFFFFGGGGDDDDDDDDLLLLLLLLNNNNNNNNHHHHHHHHHHLLLLLLLLVVVVVVVSSSSSSAAAAAVVVVVVVVVVVVVVSSSSSSGGGGVVVVVVVTTTTTTTCCCCCCCCCCCCLLLLLLLLRRRRRRRRRRRFFFFFFFFFFFPPPPPPPGGGGQQQQQQQQQLLLLLLLLNNNNNNNNSSSSSSDDDDDDDDLLLLLLLLRRRRRRRRRRRKKKKKKKKKLLLLLLLLAAAAAVVVVVVVNNNNNNNNLLLLLLLLVVVVVVVPPPPPPPFFFFFFFFFFFPPPPPPPRRRRRRRRRRRLLLLLLLLHHHHHHHHHHFFFFFFFFFFFFFFFFFFFFFFMMMMMMMMMMMMMMMMGGGGFFFFFFFFFFFAAAAAPPPPPPPLLLLLLLLSSSSSSSSSSSSRRRRRRRRRRRGGGGSSSSSSQQQQQQQQQQQQQQQQQQYYYYYYYYYYYYRRRRRRRRRRRGGGGLLLLLLLLSSSSSSVVVVVVVPPPPPPPDDDDDDDDVVVVVVVTTTTTTTQQQQQQQQQQQQQQQQQQMMMMMMMMFFFFFFFFFFFDDDDDDDDAAAAAKKKKKKKKKNNNNNNNNMMMMMMMMMMMMMMMMQQQQQQQQQAAAAAAAAAADDDDDDDDPPPPPPPAAAAAHHHHHHHHHHGGGGRRRRRRRRRRRYYYYYYYYYYYYLLLLLLLLTTTTTTTAAAAASSSSSSAAAAALLLLLLLLFFFFFFFFFFFRRRRRRRRRRRGGGGRRRRRRRRRRRMMMMMMMMSSSSSSTTTTTTTKKKKKKKKKEEEEEEEEEVVVVVVVDDDDDDDDEEEEEEEEEQQQQQQQQQMMMMMMMMLLLLLLLLNNNNNNNNVVVVVVVQQQQQQQQQNNNNNNNNKKKKKKKKKNNNNNNNNSSSSSSSSSSSSYYYYYYYYYYYYFFFFFFFFFFFIIIIIIIIEEEEEEEEEWWWWWWWWWWWWWWIIIIIIIIPPPPPPPNNNNNNNNNNNNNNNNIIIIIIIIKKKKKKKKKSSSSSSSSSSSSIIIIIIIICCCCCCDDDDDDDDIIIIIIIIPPPPPPPPPPPPPPKKKKKKKKKGGGGLLLLLLLLKKKKKKKKKMMMMMMMMAAAAAVVVVVVVTTTTTTTFFFFFFFFFFFVVVVVVVGGGGNNNNNNNNNNNNNNNNTTTTTTTCCCCCCIIIIIIIIQQQQQQQQQEEEEEEEEEMMMMMMMMFFFFFFFFFFFRRRRRRRRRRRRRRRRRRRRRRVVVVVVVGGGGEEEEEEEEEQQQQQQQQQFFFFFFFFFFFTTTTTTTAAAAAMMMMMMMMFFFFFFFFFFFRRRRRRRRRRRRRRRRRRRRRRKKKKKKKKKAAAAAFFFFFFFFFFFLLLLLLLLHHHHHHHHHHWWWWWWWWWWWWWWYYYYYYYYYYYYTTTTTTTGGGGEEEEEEEEEGGGGMMMMMMMMDDDDDDDDEEEEEEEEEMMMMMMMMEEEEEEEEEFFFFFFFFFFFTTTTTTTEEEEEEEEEAAAAAEEEEEEEEESSSSSSNNNNNNNNMMMMMMMMNNNNNNNNDDDDDDDDLLLLLLLLVVVVVVVSSSSSSEEEEEEEEEYYYYYYYYYYYYQQQQQQQQQQQQQQQQQQYYYYYYYYYYYYQQQQQQQQQDDDDDDDDAAAAATTTTTTTIIIIIIIIEEEEEEEEEEEEEEEEEEEEEEEEEEEGGGGEEEEEEEEEFFFFFFFFFFFDDDDDDDDEEEEEEEEEEEEEEEEEEEEEEEEEEEQQQQQQQQQYYYYYYYYYYYYY

SEQ ID NO: 257 - protein, 3488 aa, Venturia inaequalis
MMMMMMMMRRRRRRRRRRREEEEEEEEEIIIIIIIIVVVVVVVHHHHHHHHHHLLLLLLLLQQQQQQQQQTTTTTTTGGGGQQQQQQQQQCCCCCCGGGGNNNNNNNNQQQQQQQQQIIIIIIIIGGGGAAAAAAAAAAFFFFFFFFFFFWWWWWWWWWWWWWWQQQQQQQQQTTTTTTTIIIIIIIISSSSSSGGGGEEEEEEEEEHHHHHHHHHHGGGGLLLLLLLLDDDDDDDDGGGGSSSSSSGGGGVVVVVVVYYYYYYYYYYYYNNNNNNNNGGGGTTTTTTTSSSSSSDDDDDDDDLLLLLLLLQQQQQQQQQLLLLLLLLEEEEEEEEERRRRRRRRRRRMMMMMMMMNNNNNNNNVVVVVVVYYYYYYYYYYYYFFFFFFFFFFFNNNNNNNNEEEEEEEEEAAAAASSSSSSGGGGNNNNNNNNKKKKKKKKKFFFFFFFFFFFVVVVVVVPPPPPPPRRRRRRRRRRRAAAAAVVVVVVVLLLLLLLLVVVVVVVDDDDDDDDLLLLLLLLEEEEEEEEEPPPPPPPGGGGTTTTTTTMMMMMMMMDDDDDDDDAAAAAVVVVVVVRRRRRRRRRRRAAAAAGGGGPPPPPPPFFFFFFFFFFFGGGGQQQQQQQQQLLLLLLLLFFFFFFFFFFFRRRRRRRRRRRPPPPPPPDDDDDDDDNNNNNNNNFFFFFFFFFFFVVVVVVVFFFFFFFFFFFGGGGQQQQQQQQQSSSSSSGGGGAAAAAGGGGNNNNNNNNNNNNNNNNWWWWWWWWWWWWWWAAAAAKKKKKKKKKGGGGHHHHHHHHHHYYYYYYYYYYYYTTTTTTTEEEEEEEEEGGGGAAAAAEEEEEEEEELLLLLLLLVVVVVVVDDDDDDDDQQQQQQQQQVVVVVVVLLLLLLLLDDDDDDDDVVVVVVVVVVVVVVRRRRRRRRRRRRRRRRRRRRRREEEEEEEEEAAAAAEEEEEEEEEGGGGCCCCCCDDDDDDDDCCCCCCLLLLLLLLQQQQQQQQQGGGGFFFFFFFFFFFQQQQQQQQQIIIIIIIITTTTTTTHHHHHHHHHHSSSSSSLLLLLLLLGGGGGGGGGGGGTTTTTTTGGGGAAAAAGGGGMMMMMMMMGGGGTTTTTTTLLLLLLLLLLLLLLLLIIIIIIIISSSSSSKKKKKKKKKIIIIIIIIRRRRRRRRRRREEEEEEEEEEEEEEEEEEFFFFFFFFFFFPPPPPPPDDDDDDDDRRRRRRRRRRRMMMMMMMMMMMMMMMMAAAAATTTTTTTFFFFFFFFFFFSSSSSSVVVVVVVVVVVVVVPPPPPPPSSSSSSPPPPPPPKKKKKKKKKVVVVVVVSSSSSSDDDDDDDDTTTTTTTVVVVVVVVVVVVVVEEEEEEEEEPPPPPPPYYYYYYYYYYYYNNNNNNNNAAAAATTTTTTTLLLLLLLLSSSSSSVVVVVVVHHHHHHHHHHQQQQQQQQQLLLLLLLLVVVVVVVEEEEEEEEENNNNNNNNSSSSSSDDDDDDDDEEEEEEEEETTTTTTTFFFFFFFFFFFCCCCCCIIIIIIIIDDDDDDDDNNNNNNNNEEEEEEEEEAAAAALLLLLLLLYYYYYYYYYYYYDDDDDDDDIIIIIIIICCCCCCMMMMMMMMRRRRRRRRRRRTTTTTTTLLLLLLLLKKKKKKKKKLLLLLLLLNNNNNNNNNNNNNNNNPPPPPPPSSSSSSYYYYYYYYYYYYGGGGDDDDDDDDLLLLLLLLNNNNNNNNHHHHHHHHHHLLLLLLLLVVVVVVVSSSSSSAAAAAVVVVVVVMMMMMMMMSSSSSSGGGGVVVVVVVTTTTTTTTTTTTTTCCCCCCLLLLLLLLRRRRRRRRRRRFFFFFFFFFFFPPPPPPPGGGGQQQQQQQQQLLLLLLLLNNNNNNNNSSSSSSDDDDDDDDLLLLLLLLRRRRRRRRRRRKKKKKKKKKLLLLLLLLAAAAAVVVVVVVNNNNNNNNMMMMMMMMVVVVVVVPPPPPPPFFFFFFFFFFFPPPPPPPRRRRRRRRRRRLLLLLLLLHHHHHHHHHHFFFFFFFFFFFFFFFFFFFFFFMMMMMMMMVVVVVVVGGGGFFFFFFFFFFFAAAAAPPPPPPPLLLLLLLLTTTTTTTSSSSSSRRRRRRRRRRRGGGGAAAAAHHHHHHHHHHSSSSSSFFFFFFFFFFFRRRRRRRRRRRAAAAAVVVVVVVTTTTTTTVVVVVVVPPPPPPPEEEEEEEEELLLLLLLLTTTTTTTQQQQQQQQQQQQQQQQQQMMMMMMMMFFFFFFFFFFFDDDDDDDDPPPPPPPKKKKKKKKKNNNNNNNNMMMMMMMMMMMMMMMMAAAAAAAAAASSSSSSDDDDDDDDFFFFFFFFFFFRRRRRRRRRRRNNNNNNNNGGGGRRRRRRRRRRRYYYYYYYYYYYYLLLLLLLLTTTTTTTSSSSSSSSSSSSAAAAAIIIIIIIIFFFFFFFFFFFRRRRRRRRRRRGGGGKKKKKKKKKVVVVVVVSSSSSSMMMMMMMMKKKKKKKKKEEEEEEEEEVVVVVVVEEEEEEEEEDDDDDDDDQQQQQQQQQMMMMMMMMRRRRRRRRRRRNNNNNNNNVVVVVVVQQQQQQQQQNNNNNNNNKKKKKKKKKNNNNNNNNSSSSSSSSSSSSYYYYYYYYYYYYFFFFFFFFFFFVVVVVVVEEEEEEEEEWWWWWWWWWWWWWWIIIIIIIIPPPPPPPNNNNNNNNNNNNNNNNVVVVVVVQQQQQQQQQTTTTTTTAAAAALLLLLLLLCCCCCCSSSSSSIIIIIIIIPPPPPPPPPPPPPPRRRRRRRRRRRGGGGLLLLLLLLKKKKKKKKKMMMMMMMMSSSSSSSSSSSSTTTTTTTFFFFFFFFFFFVVVVVVVGGGGNNNNNNNNSSSSSSTTTTTTTSSSSSSIIIIIIIIQQQQQQQQQEEEEEEEEELLLLLLLLFFFFFFFFFFFKKKKKKKKKRRRRRRRRRRRVVVVVVVGGGGDDDDDDDDQQQQQQQQQFFFFFFFFFFFTTTTTTTAAAAAMMMMMMMMFFFFFFFFFFFRRRRRRRRRRRRRRRRRRRRRRKKKKKKKKKAAAAAFFFFFFFFFFFLLLLLLLLHHHHHHHHHHWWWWWWWWWWWWWWYYYYYYYYYYYYTTTTTTTGGGGEEEEEEEEEGGGGMMMMMMMMDDDDDDDDEEEEEEEEEMMMMMMMMEEEEEEEEEFFFFFFFFFFFTTTTTTTEEEEEEEEEAAAAAEEEEEEEEESSSSSSNNNNNNNNMMMMMMMMNNNNNNNNDDDDDDDDLLLLLLLLVVVVVVVSSSSSSEEEEEEEEEYYYYYYYYYYYYQQQQQQQQQQQQQQQQQQYYYYYYYYYYYYQQQQQQQQQEEEEEEEEEAAAAASSSSSSVVVVVVVSSSSSSEEEEEEEEEGGGGEEEEEEEEEEEEEEEEEEEEEEEEEEEYYYYYYYYYYYYDDDDDDDDEEEEEEEEEEEEEEEEEEAAAAAPPPPPPPLLLLLLLLEEEEEEEEEGGGGEEEEEEEEEEEEEEEEEEE

SEQ ID NO: 258 - protein, 3486 aa, Homo sapiens; identical to SEQ ID NO: 195

SEQ ID NO: 259 - protein, 3579 aa, Saccharomyces cerevisiae
MMMMMMMMRRRRRRRRRRREEEEEEEEEIIIIIIIIIIIIIIIIHHHHHHHHHHIIIIIIIISSSSSSTTTTTTTGGGGQQQQQQQQQCCCCCCGGGGNNNNNNNNQQQQQQQQQIIIIIIIIGGGGAAAAAAAAAAFFFFFFFFFFFWWWWWWWWWWWWWWEEEEEEEEETTTTTTTIIIIIIIICCCCCCGGGGEEEEEEEEEHHHHHHHHHHGGGGLLLLLLLLDDDDDDDDFFFFFFFFFFFNNNNNNNNGGGGTTTTTTTYYYYYYYYYYYYHHHHHHHHHHGGGGHHHHHHHHHHDDDDDDDDDDDDDDDDIIIIIIIIQQQQQQQQQKKKKKKKKKEEEEEEEEERRRRRRRRRRRLLLLLLLLNNNNNNNNVVVVVVVYYYYYYYYYYYYFFFFFFFFFFFNNNNNNNNEEEEEEEEEAAAAASSSSSSSSSSSSGGGGKKKKKKKKKWWWWWWWWWWWWWWVVVVVVVPPPPPPPRRRRRRRRRRRSSSSSSIIIIIIIINNNNNNNNVVVVVVVDDDDDDDDLLLLLLLLEEEEEEEEEPPPPPPPGGGGTTTTTTTIIIIIIIIDDDDDDDDAAAAAVVVVVVVRRRRRRRRRRRNNNNNNNNSSSSSSAAAAAIIIIIIIIGGGGNNNNNNNNLLLLLLLLFFFFFFFFFFFRRRRRRRRRRRPPPPPPPDDDDDDDDNNNNNNNNYYYYYYYYYYYYIIIIIIIIFFFFFFFFFFFGGGGQQQQQQQQQSSSSSSSSSSSSAAAAAGGGGNNNNNNNNVVVVVVVWWWWWWWWWWWWWWAAAAAKKKKKKKKKGGGGHHHHHHHHHHYYYYYYYYYYYYTTTTTTTEEEEEEEEEGGGGAAAAAEEEEEEEEELLLLLLLLVVVVVVVDDDDDDDDSSSSSSVVVVVVVMMMMMMMMDDDDDDDDVVVVVVVIIIIIIIIRRRRRRRRRRRRRRRRRRRRRREEEEEEEEEAAAAAEEEEEEEEEGGGGCCCCCCDDDDDDDDSSSSSSLLLLLLLLQQQQQQQQQGGGGFFFFFFFFFFFQQQQQQQQQIIIIIIIITTTTTTTHHHHHHHHHHSSSSSSLLLLLLLLGGGGGGGGGGGGTTTTTTTGGGGSSSSSSGGGGMMMMMMMMGGGGTTTTTTTLLLLLLLLLLLLLLLLIIIIIIIISSSSSSKKKKKKKKKIIIIIIIIRRRRRRRRRRREEEEEEEEEEEEEEEEEEFFFFFFFFFFFPPPPPPPDDDDDDDDRRRRRRRRRRRMMMMMMMMMMMMMMMMAAAAATTTTTTTFFFFFFFFFFFSSSSSSVVVVVVVLLLLLLLLPPPPPPPSSSSSSPPPPPPPKKKKKKKKKTTTTTTTSSSSSSDDDDDDDDTTTTTTTVVVVVVVVVVVVVVEEEEEEEEEPPPPPPPYYYYYYYYYYYYNNNNNNNNAAAAATTTTTTTLLLLLLLLSSSSSSVVVVVVVHHHHHHHHHHQQQQQQQQQLLLLLLLLVVVVVVVEEEEEEEEEHHHHHHHHHHSSSSSSDDDDDDDDEEEEEEEEETTTTTTTFFFFFFFFFFFCCCCCCIIIIIIIIDDDDDDDDNNNNNNNNEEEEEEEEEAAAAALLLLLLLLYYYYYYYYYYYYDDDDDDDDIIIIIIIICCCCCCQQQQQQQQQRRRRRRRRRRRTTTTTTTLLLLLLLLKKKKKKKKKLLLLLLLLNNNNNNNNQQQQQQQQQPPPPPPPSSSSSSYYYYYYYYYYYYGGGGDDDDDDDDLLLLLLLLNNNNNNNNNNNNNNNNLLLLLLLLVVVVVVVSSSSSSSSSSSSVVVVVVVMMMMMMMMSSSSSSGGGGVVVVVVVTTTTTTTTTTTTTTSSSSSSLLLLLLLLRRRRRRRRRRRYYYYYYYYYYYYPPPPPPPGGGGQQQQQQQQQLLLLLLLLNNNNNNNNSSSSSSDDDDDDDDLLLLLLLLRRRRRRRRRRRKKKKKKKKKLLLLLLLLAAAAAVVVVVVVNNNNNNNNLLLLLLLLVVVVVVVPPPPPPPFFFFFFFFFFFPPPPPPPRRRRRRRRRRRLLLLLLLLHHHHHHHHHHFFFFFFFFFFFFFFFFFFFFFFMMMMMMMMVVVVVVVGGGGYYYYYYYYYYYYAAAAAPPPPPPPLLLLLLLLTTTTTTTAAAAAIIIIIIIIGGGGSSSSSSQQQQQQQQQSSSSSSFFFFFFFFFFFRRRRRRRRRRRSSSSSSLLLLLLLLTTTTTTTVVVVVVVPPPPPPPEEEEEEEEELLLLLLLLTTTTTTTQQQQQQQQQQQQQQQQQQMMMMMMMMFFFFFFFFFFFDDDDDDDDAAAAAKKKKKKKKKNNNNNNNNMMMMMMMMMMMMMMMMAAAAAAAAAAAAAAADDDDDDDDPPPPPPPRRRRRRRRRRRNNNNNNNNGGGGRRRRRRRRRRRYYYYYYYYYYYYLLLLLLLLTTTTTTTVVVVVVVAAAAAAAAAAFFFFFFFFFFFFFFFFFFFFFFRRRRRRRRRRRGGGGKKKKKKKKKVVVVVVVSSSSSSVVVVVVVKKKKKKKKKEEEEEEEEEVVVVVVVEEEEEEEEEDDDDDDDDEEEEEEEEEMMMMMMMMHHHHHHHHHHKKKKKKKKKVVVVVVVQQQQQQQQQSSSSSSKKKKKKKKKNNNNNNNNSSSSSSDDDDDDDDYYYYYYYYYYYYFFFFFFFFFFFVVVVVVVEEEEEEEEEWWWWWWWWWWWWWWIIIIIIIIPPPPPPPNNNNNNNNNNNNNNNNVVVVVVVQQQQQQQQQTTTTTTTAAAAAVVVVVVVCCCCCCSSSSSSVVVVVVVAAAAAPPPPPPPQQQQQQQQQGGGGLLLLLLLLDDDDDDDDMMMMMMMMAAAAAAAAAATTTTTTTFFFFFFFFFFFIIIIIIIIAAAAANNNNNNNNSSSSSSTTTTTTTSSSSSSIIIIIIIIQQQQQQQQQEEEEEEEEELLLLLLLLFFFFFFFFFFFKKKKKKKKKRRRRRRRRRRRVVVVVVVGGGGDDDDDDDDQQQQQQQQQFFFFFFFFFFFSSSSSSAAAAAMMMMMMMMFFFFFFFFFFFKKKKKKKKKRRRRRRRRRRRKKKKKKKKKAAAAAFFFFFFFFFFFLLLLLLLLHHHHHHHHHHWWWWWWWWWWWWWWYYYYYYYYYYYYTTTTTTTSSSSSSEEEEEEEEEGGGGMMMMMMMMDDDDDDDDEEEEEEEEELLLLLLLLEEEEEEEEEFFFFFFFFFFFSSSSSSEEEEEEEEEAAAAAEEEEEEEEESSSSSSNNNNNNNNMMMMMMMMNNNNNNNNDDDDDDDDLLLLLLLLVVVVVVVSSSSSSEEEEEEEEEYYYYYYYYYYYYQQQQQQQQQQQQQQQQQQYYYYYYYYYYYYQQQQQQQQQEEEEEEEEEAAAAATTTTTTTVVVVVVVEEEEEEEEEDDDDDDDDDDDDDDDDEEEEEEEEEEEEEEEEEEVVVVVVVDDDDDDDDEEEEEEEEENNNNNNNNGGGGDDDDDDDDFFFFFFFFFFFGGGGAAAAAPPPPPPPQQQQQQQQQNNNNNNNNQQQQQQQQQDDDDDDDDEEEEEEEEEPPPPPPPIIIIIIIITTTTTTTEEEEEEEEENNNNNNNNFFFFFFFFFFFEEEEEEEEEE

SEQ ID NO: 260 - protein, 3587 aa, Homo sapiens
MMMMMMMMSSSSSSIIIIIIIIVVVVVVVTTTTTTTVVVVVVVQQQQQQQQQLLLLLLLLGGGGQQQQQQQQQCCCCCCGGGGNNNNNNNNQQQQQQQQQIIIIIIIIGGGGFFFFFFFFFFFEEEEEEEEEVVVVVVVFFFFFFFFFFFDDDDDDDDAAAAALLLLLLLLLLLLLLLLSSSSSSDDDDDDDDSSSSSSHHHHHHHHHHSSSSSSSSSSSSQQQQQQQQQGGGGLLLLLLLLCCCCCCSSSSSSMMMMMMMMRRRRRRRRRRREEEEEEEEENNNNNNNNEEEEEEEEEAAAAAYYYYYYYYYYYYQQQQQQQQQAAAAASSSSSSCCCCCCKKKKKKKKKEEEEEEEEERRRRRRRRRRRFFFFFFFFFFFFFFFFFFFFFFSSSSSSEEEEEEEEEEEEEEEEEEEEEEEEEEENNNNNNNNGGGGVVVVVVVPPPPPPPIIIIIIIIAAAAARRRRRRRRRRRAAAAAVVVVVVVLLLLLLLLVVVVVVVDDDDDDDDMMMMMMMMEEEEEEEEEPPPPPPPKKKKKKKKKVVVVVVVIIIIIIIINNNNNNNNQQQQQQQQQTTTTTTTLLLLLLLLSSSSSSKKKKKKKKKAAAAAAAAAAQQQQQQQQQSSSSSSGGGGQQQQQQQQQWWWWWWWWWWWWWWKKKKKKKKKYYYYYYYYYYYYGGGGQQQQQQQQQHHHHHHHHHHAAAAACCCCCCFFFFFFFFFFFCCCCCCQQQQQQQQQKKKKKKKKKQQQQQQQQQGGGGSSSSSSGGGGNNNNNNNNNNNNNNNNWWWWWWWWWWWWWWAAAAAYYYYYYYYYYYYGGGGYYYYYYYYYYYYSSSSSSVVVVVVVHHHHHHHHHHGGGGPPPPPPPRRRRRRRRRRRHHHHHHHHHHEEEEEEEEEEEEEEEEEESSSSSSIIIIIIIIMMMMMMMMNNNNNNNNIIIIIIIIIIIIIIIIRRRRRRRRRRRKKKKKKKKKEEEEEEEEEVVVVVVVEEEEEEEEEKKKKKKKKKCCCCCCDDDDDDDDSSSSSSFFFFFFFFFFFSSSSSSGGGGFFFFFFFFFFFFFFFFFFFFFFIIIIIIIIIIIIIIIIMMMMMMMMSSSSSSMMMMMMMMAAAAAGGGGGGGGTTTTTTTGGGGSSSSSSGGGGLLLLLLLLGGGGAAAAAFFFFFFFFFFFVVVVVVVTTTTTTTQQQQQQQQQNNNNNNNNLLLLLLLLEEEEEEEEEDDDDDDDDQQQQQQQQQYYYYYYYYYYYYSSSSSSNNNNNNNNSSSSSSLLLLLLLLKKKKKKKKKMMMMMMMMNNNNNNNNQQQQQQQQQIIIIIIIIIIIIIIIIWWWWWWWWWWWWWWPPPPPPPYYYYYYYYYYYYGGGGTTTTTTTGGGGEEEEEEEEEVVVVVVVIIIIIIIIVVVVVVVQQQQQQQQQNNNNNNNNYYYYYYYYYYYYNNNNNNNNSSSSSSIIIIIIIILLLLLLLLTTTTTTTLLLLLLLLSSSSSSHHHHHHHHHHLLLLLLLLYYYYYYYYYYYYRRRRRRRRRRRSSSSSSSSSSSSDDDDDDDDAAAAALLLLLLLLLLLLLLLLLLLLLLLLHHHHHHHHHHEEEEEEEEENNNNNNNNDDDDDDDDAAAAAIIIIIIIIHHHHHHHHHHKKKKKKKKKIIIIIIIICCCCCCAAAAAKKKKKKKKKLLLLLLLLMMMMMMMMNNNNNNNNIIIIIIIIKKKKKKKKKQQQQQQQQQIIIIIIIISSSSSSFFFFFFFFFFFSSSSSSDDDDDDDDIIIIIIIINNNNNNNNQQQQQQQQQVVVVVVVLLLLLLLLAAAAAHHHHHHHHHHQQQQQQQQQLLLLLLLLGGGGSSSSSSVVVVVVVFFFFFFFFFFFQQQQQQQQQPPPPPPPTTTTTTTYYYYYYYYYYYYSSSSSSAAAAAEEEEEEEEESSSSSSSSSSSSFFFFFFFFFFFHHHHHHHHHHYYYYYYYYYYYYRRRRRRRRRRRRRRRRRRRRRRNNNNNNNNPPPPPPPLLLLLLLLGGGGDDDDDDDDLLLLLLLLMMMMMMMMEEEEEEEEEHHHHHHHHHHLLLLLLLLVVVVVVVPPPPPPPHHHHHHHHHHPPPPPPPEEEEEEEEEFFFFFFFFFFFKKKKKKKKKMMMMMMMMLLLLLLLLSSSSSSVVVVVVVRRRRRRRRRRRNNNNNNNNIIIIIIIIPPPPPPPHHHHHHHHHHMMMMMMMMSSSSSSEEEEEEEEENNNNNNNNSSSSSSLLLLLLLLAAAAAYYYYYYYYYYYYTTTTTTTTTTTTTTFFFFFFFFFFFTTTTTTTWWWWWWWWWWWWWWAAAAAGGGGLLLLLLLLLLLLLLLLKKKKKKKKKHHHHHHHHHHLLLLLLLLRRRRRRRRRRRQQQQQQQQQMMMMMMMMLLLLLLLLIIIIIIIISSSSSSNNNNNNNNAAAAAKKKKKKKKKMMMMMMMMEEEEEEEEEEEEEEEEEEGGGGIIIIIIIIDDDDDDDDRRRRRRRRRRRHHHHHHHHHHVVVVVVVWWWWWWWWWWWWWWPPPPPPPPPPPPPPLLLLLLLLSSSSSSGGGGLLLLLLLLPPPPPPPPPPPPPPLLLLLLLLSSSSSSKKKKKKKKKMMMMMMMMSSSSSSLLLLLLLLNNNNNNNNKKKKKKKKKDDDDDDDDLLLLLLLLHHHHHHHHHHFFFFFFFFFFFNNNNNNNNTTTTTTTSSSSSSIIIIIIIIAAAAANNNNNNNNLLLLLLLLVVVVVVVIIIIIIIILLLLLLLLRRRRRRRRRRRGGGGKKKKKKKKKDDDDDDDDVVVVVVVQQQQQQQQQSSSSSSAAAAADDDDDDDDVVVVVVVEEEEEEEEEGGGGFFFFFFFFFFFKKKKKKKKKDDDDDDDDPPPPPPPAAAAALLLLLLLLYYYYYYYYYYYYTTTTTTTSSSSSSWWWWWWWWWWWWWWLLLLLLLLKKKKKKKKKPPPPPPPVVVVVVVNNNNNNNNAAAAAFFFFFFFFFFFNNNNNNNNVVVVVVVWWWWWWWWWWWWWWKKKKKKKKKTTTTTTTQQQQQQQQQRRRRRRRRRRRAAAAAFFFFFFFFFFFSSSSSSKKKKKKKKKYYYYYYYYYYYYEEEEEEEEEKKKKKKKKKSSSSSSAAAAAVVVVVVVLLLLLLLLVVVVVVVSSSSSSNNNNNNNNSSSSSSQQQQQQQQQFFFFFFFFFFFLLLLLLLLVVVVVVVKKKKKKKKKPPPPPPPLLLLLLLLDDDDDDDDMMMMMMMMIIIIIIIIVVVVVVVGGGGKKKKKKKKKAAAAAWWWWWWWWWWWWWWNNNNNNNNMMMMMMMMFFFFFFFFFFFAAAAASSSSSSKKKKKKKKKAAAAAYYYYYYYYYYYYIIIIIIIIHHHHHHHHHHQQQQQQQQQYYYYYYYYYYYYTTTTTTTKKKKKKKKKFFFFFFFFFFFGGGGIIIIIIIIEEEEEEEEEEEEEEEEEEEEEEEEEEEDDDDDDDDFFFFFFFFFFFLLLLLLLLDDDDDDDDSSSSSSFFFFFFFFFFFTTTTTTTSSSSSSLLLLLLLLEEEEEEEEEQQQQQQQQQVVVVVVVVVVVVVVAAAAASSSSSSYYYYYYYYYYYYCCCCCCNNNNNNNNLLLLLLLLL

SEQ ID NO: 261 - protein, 3711 aa, Homo sapiens
MMMMMMMMTTTTTTTQQQQQQQQQSSSSSSVVVVVVVVVVVVVVVVVVVVVQQQQQQQQQVVVVVVVGGGGQQQQQQQQQCCCCCCGGGGNNNNNNNNQQQQQQQQQIIIIIIIIGGGGCCCCCCCCCCCCFFFFFFFFFFFWWWWWWWWWWWWWWDDDDDDDDLLLLLLLLAAAAALLLLLLLLRRRRRRRRRRREEEEEEEEEHHHHHHHHHHAAAAAAAAAAVVVVVVVNNNNNNNNQQQQQQQQQKKKKKKKKKGGGGIIIIIIIIYYYYYYYYYYYYDDDDDDDDEEEEEEEEEAAAAAIIIIIIIISSSSSSSSSSSSFFFFFFFFFFFFFFFFFFFFFFRRRRRRRRRRRNNNNNNNNVVVVVVVDDDDDDDDTTTTTTTRRRRRRRRRRRVVVVVVVVVVVVVVGGGGDDDDDDDDGGGGGGGGSSSSSSIIIIIIIISSSSSSKKKKKKKKKGGGGKKKKKKKKKIIIIIIIICCCCCCSSSSSSLLLLLLLLKKKKKKKKKAAAAARRRRRRRRRRRAAAAAVVVVVVVLLLLLLLLIIIIIIIIDDDDDDDDMMMMMMMMEEEEEEEEEEEEEEEEEEGGGGVVVVVVVVVVVVVVNNNNNNNNEEEEEEEEEIIIIIIIILLLLLLLLQQQQQQQQQGGGGPPPPPPPLLLLLLLLRRRRRRRRRRRDDDDDDDDVVVVVVVFFFFFFFFFFFDDDDDDDDTTTTTTTKKKKKKKKKQQQQQQQQQLLLLLLLLIIIIIIIITTTTTTTDDDDDDDDIIIIIIIISSSSSSGGGGSSSSSSGGGGNNNNNNNNNNNNNNNNWWWWWWWWWWWWWWAAAAAVVVVVVVGGGGHHHHHHHHHHKKKKKKKKKVVVVVVVFFFFFFFFFFFGGGGSSSSSSLLLLLLLLYYYYYYYYYYYYQQQQQQQQQDDDDDDDDQQQQQQQQQIIIIIIIILLLLLLLLEEEEEEEEEKKKKKKKKKFFFFFFFFFFFRRRRRRRRRRRKKKKKKKKKSSSSSSAAAAAEEEEEEEEEHHHHHHHHHHCCCCCCDDDDDDDDCCCCCCLLLLLLLLQQQQQQQQQCCCCCCFFFFFFFFFFFFFFFFFFFFFFIIIIIIIIIIIIIIIIHHHHHHHHHHSSSSSSMMMMMMMMGGGGGGGGGGGGTTTTTTTGGGGSSSSSSGGGGLLLLLLLLGGGGTTTTTTTFFFFFFFFFFFLLLLLLLLLLLLLLLLKKKKKKKKKVVVVVVVLLLLLLLLEEEEEEEEEDDDDDDDDEEEEEEEEEFFFFFFFFFFFPPPPPPPEEEEEEEEEVVVVVVVYYYYYYYYYYYYRRRRRRRRRRRFFFFFFFFFFFVVVVVVVTTTTTTTSSSSSSIIIIIIIIYYYYYYYYYYYYPPPPPPPSSSSSSGGGGEEEEEEEEEDDDDDDDDDDDDDDDDVVVVVVVIIIIIIIITTTTTTTSSSSSSPPPPPPPYYYYYYYYYYYYNNNNNNNNSSSSSSIIIIIIIILLLLLLLLAAAAAMMMMMMMMKKKKKKKKKEEEEEEEEELLLLLLLLNNNNNNNNEEEEEEEEEHHHHHHHHHHAAAAADDDDDDDDCCCCCCVVVVVVVLLLLLLLLPPPPPPPIIIIIIIIDDDDDDDDNNNNNNNNQQQQQQQQQSSSSSSLLLLLLLLFFFFFFFFFFFDDDDDDDDIIIIIIIIIIIIIIIISSSSSSKKKKKKKKKIIIIIIIIDDDDDDDDLLLLLLLLMMMMMMMMVVVVVVVNNNNNNNNSSSSSSGGGGKKKKKKKKKLLLLLLLLGGGGTTTTTTTTTTTTTTVVVVVVVKKKKKKKKKPPPPPPPKKKKKKKKKSSSSSSLLLLLLLLVVVVVVVTTTTTTTSSSSSSSSSSSSSSSSSSGGGGAAAAALLLLLLLLKKKKKKKKKKKKKKKKKKQQQQQQQQQHHHHHHHHHHKKKKKKKKKKKKKKKKKKPPPPPPPFFFFFFFFFFFDDDDDDDDAAAAAMMMMMMMMNNNNNNNNNNNNNNNNIIIIIIIIVVVVVVVAAAAANNNNNNNNLLLLLLLLLLLLLLLLLLLLLLLLNNNNNNNNLLLLLLLLTTTTTTTSSSSSSSSSSSSAAAAARRRRRRRRRRRFFFFFFFFFFFEEEEEEEEEGGGGSSSSSSLLLLLLLLNNNNNNNNMMMMMMMMDDDDDDDDLLLLLLLLNNNNNNNNEEEEEEEEEIIIIIIIISSSSSSMMMMMMMMNNNNNNNNLLLLLLLLVVVVVVVPPPPPPPFFFFFFFFFFFPPPPPPPQQQQQQQQQLLLLLLLLHHHHHHHHHHYYYYYYYYYYYYLLLLLLLLVVVVVVVSSSSSSSSSSSSLLLLLLLLTTTTTTTPPPPPPPLLLLLLLLYYYYYYYYYYYYTTTTTTTLLLLLLLLTTTTTTTDDDDDDDDVVVVVVVNNNNNNNNIIIIIIIIPPPPPPPPPPPPPPRRRRRRRRRRRRRRRRRRRRRRLLLLLLLLDDDDDDDDQQQQQQQQQMMMMMMMMFFFFFFFFFFFSSSSSSDDDDDDDDAAAAAFFFFFFFFFFFSSSSSSKKKKKKKKKDDDDDDDDHHHHHHHHHHQQQQQQQQQLLLLLLLLLLLLLLLLRRRRRRRRRRRAAAAADDDDDDDDPPPPPPPKKKKKKKKKHHHHHHHHHHSSSSSSLLLLLLLLYYYYYYYYYYYYLLLLLLLLAAAAACCCCCCAAAAALLLLLLLLMMMMMMMMVVVVVVVRRRRRRRRRRRGGGGNNNNNNNNVVVVVVVQQQQQQQQQIIIIIIIISSSSSSDDDDDDDDLLLLLLLLRRRRRRRRRRRRRRRRRRRRRRNNNNNNNNIIIIIIIIEEEEEEEEERRRRRRRRRRRLLLLLLLLKKKKKKKKKPPPPPPPSSSSSSLLLLLLLLQQQQQQQQQFFFFFFFFFFFVVVVVVVSSSSSSWWWWWWWWWWWWWWNNNNNNNNQQQQQQQQQEEEEEEEEEGGGGWWWWWWWWWWWWWWKKKKKKKKKTTTTTTTSSSSSSLLLLLLLLCCCCCCSSSSSSVVVVVVVPPPPPPPPPPPPPPVVVVVVVGGGGHHHHHHHHHHSSSSSSHHHHHHHHHHSSSSSSLLLLLLLLLLLLLLLLAAAAALLLLLLLLAAAAANNNNNNNNNNNNNNNNTTTTTTTCCCCCCVVVVVVVKKKKKKKKKPPPPPPPTTTTTTTFFFFFFFFFFFMMMMMMMMEEEEEEEEELLLLLLLLKKKKKKKKKEEEEEEEEERRRRRRRRRRRFFFFFFFFFFFMMMMMMMMRRRRRRRRRRRLLLLLLLLYYYYYYYYYYYYKKKKKKKKKKKKKKKKKKKKKKKKKKKAAAAAHHHHHHHHHHLLLLLLLLHHHHHHHHHHHHHHHHHHHHYYYYYYYYYYYYLLLLLLLLQQQQQQQQQVVVVVVVEEEEEEEEEGGGGMMMMMMMMEEEEEEEEEEEEEEEEEESSSSSSCCCCCCFFFFFFFFFFFTTTTTTTEEEEEEEEEAAAAAVVVVVVVSSSSSSSSSSSSLLLLLLLLSSSSSSAAAAALLLLLLLLIIIIIIIIQQQQQQQQQEEEEEEEEEYYYYYYYYYYYYDDDDDDDDQQQQQQQQQLLLLLLLLDDDDDDDDAAAAATTTTTTTKKKKKKKKKNNNNNNNNMMMMMMMMPPPPPPPVVVVVVVQQQQQQQQQDDDDDDDDLLLLLLLLPPPPPPPRRRRRRRRRRRLLLLLLLLSSSSSSIIIIIIIIAAAAAMMMMMMMMM

SEQ ID NO: 262 - protein, 3600 aa, Homo sapiens
MMMMMMMMPPPPPPPRRRRRRRRRRREEEEEEEEEIIIIIIIIIIIIIIIITTTTTTTLLLLLLLLQQQQQQQQQLLLLLLLLGGGGQQQQQQQQQCCCCCCGGGGNNNNNNNNQQQQQQQQQIIIIIIIIGGGGFFFFFFFFFFFEEEEEEEEEFFFFFFFFFFFWWWWWWWWWWWWWWKKKKKKKKKQQQQQQQQQLLLLLLLLCCCCCCAAAAAEEEEEEEEEHHHHHHHHHHGGGGIIIIIIIISSSSSSPPPPPPPEEEEEEEEEGGGGIIIIIIIIVVVVVVVEEEEEEEEEEEEEEEEEEFFFFFFFFFFFAAAAATTTTTTTEEEEEEEEEGGGGTTTTTTTDDDDDDDDRRRRRRRRRRRKKKKKKKKKDDDDDDDDVVVVVVVFFFFFFFFFFFFFFFFFFFFFFYYYYYYYYYYYYQQQQQQQQQAAAAADDDDDDDDDDDDDDDDEEEEEEEEEHHHHHHHHHHYYYYYYYYYYYYIIIIIIIIPPPPPPPRRRRRRRRRRRAAAAAVVVVVVVLLLLLLLLLLLLLLLLDDDDDDDDLLLLLLLLEEEEEEEEEPPPPPPPRRRRRRRRRRRVVVVVVVIIIIIIIIHHHHHHHHHHSSSSSSIIIIIIIILLLLLLLLNNNNNNNNSSSSSSPPPPPPPYYYYYYYYYYYYAAAAAKKKKKKKKKLLLLLLLLYYYYYYYYYYYYNNNNNNNNPPPPPPPEEEEEEEEENNNNNNNNIIIIIIIIYYYYYYYYYYYYLLLLLLLLSSSSSSEEEEEEEEEHHHHHHHHHHGGGGGGGGGGGGAAAAAGGGGNNNNNNNNNNNNNNNNWWWWWWWWWWWWWWAAAAASSSSSSGGGGFFFFFFFFFFFSSSSSSQQQQQQQQQGGGGEEEEEEEEEKKKKKKKKKIIIIIIIIHHHHHHHHHHEEEEEEEEEDDDDDDDDIIIIIIIIFFFFFFFFFFFDDDDDDDDIIIIIIIIIIIIIIIIDDDDDDDDRRRRRRRRRRREEEEEEEEEAAAAADDDDDDDDGGGGSSSSSSDDDDDDDDSSSSSSLLLLLLLLEEEEEEEEEGGGGFFFFFFFFFFFVVVVVVVLLLLLLLLCCCCCCHHHHHHHHHHSSSSSSIIIIIIIIAAAAAGGGGGGGGTTTTTTTGGGGSSSSSSGGGGLLLLLLLLGGGGSSSSSSYYYYYYYYYYYYLLLLLLLLLLLLLLLLEEEEEEEEERRRRRRRRRRRLLLLLLLLNNNNNNNNDDDDDDDDRRRRRRRRRRRYYYYYYYYYYYYPPPPPPPKKKKKKKKKKKKKKKKKKLLLLLLLLVVVVVVVQQQQQQQQQTTTTTTTYYYYYYYYYYYYSSSSSSVVVVVVVFFFFFFFFFFFPPPPPPPNNNNNNNNQQQQQQQQQDDDDDDDDEEEEEEEEEMMMMMMMMSSSSSSDDDDDDDDVVVVVVVVVVVVVVVVVVVVVQQQQQQQQQPPPPPPPYYYYYYYYYYYYNNNNNNNNSSSSSSLLLLLLLLLLLLLLLLTTTTTTTLLLLLLLLKKKKKKKKKRRRRRRRRRRRLLLLLLLLTTTTTTTQQQQQQQQQNNNNNNNNAAAAADDDDDDDDCCCCCCVVVVVVVVVVVVVVVVVVVVVLLLLLLLLDDDDDDDDNNNNNNNNTTTTTTTAAAAALLLLLLLLNNNNNNNNRRRRRRRRRRRIIIIIIIIAAAAATTTTTTTDDDDDDDDRRRRRRRRRRRLLLLLLLLHHHHHHHHHHIIIIIIIIQQQQQQQQQNNNNNNNNPPPPPPPSSSSSSFFFFFFFFFFFSSSSSSQQQQQQQQQIIIIIIIINNNNNNNNQQQQQQQQQLLLLLLLLVVVVVVVSSSSSSTTTTTTTIIIIIIIIMMMMMMMMSSSSSSAAAAASSSSSSTTTTTTTTTTTTTTTTTTTTTLLLLLLLLRRRRRRRRRRRYYYYYYYYYYYYPPPPPPPGGGGYYYYYYYYYYYYMMMMMMMMNNNNNNNNNNNNNNNNDDDDDDDDLLLLLLLLIIIIIIIIGGGGLLLLLLLLIIIIIIIIAAAAASSSSSSLLLLLLLLIIIIIIIIPPPPPPPTTTTTTTPPPPPPPRRRRRRRRRRRLLLLLLLLHHHHHHHHHHFFFFFFFFFFFLLLLLLLLMMMMMMMMTTTTTTTGGGGYYYYYYYYYYYYTTTTTTTPPPPPPPLLLLLLLLTTTTTTTTTTTTTTDDDDDDDDQQQQQQQQQSSSSSSVVVVVVVAAAAASSSSSSVVVVVVVRRRRRRRRRRRKKKKKKKKKTTTTTTTTTTTTTTVVVVVVVLLLLLLLLDDDDDDDDVVVVVVVMMMMMMMMRRRRRRRRRRRRRRRRRRRRRRLLLLLLLLLLLLLLLLQQQQQQQQQPPPPPPPKKKKKKKKKNNNNNNNNVVVVVVVMMMMMMMMVVVVVVVSSSSSSTTTTTTTGGGGRRRRRRRRRRRDDDDDDDDRRRRRRRRRRRQQQQQQQQQTTTTTTTNNNNNNNNHHHHHHHHHHCCCCCCYYYYYYYYYYYYIIIIIIIIAAAAAIIIIIIIILLLLLLLLNNNNNNNNIIIIIIIIIIIIIIIIQQQQQQQQQGGGGEEEEEEEEEVVVVVVVDDDDDDDDPPPPPPPTTTTTTTQQQQQQQQQVVVVVVVHHHHHHHHHHKKKKKKKKKSSSSSSLLLLLLLLQQQQQQQQQRRRRRRRRRRRIIIIIIIIRRRRRRRRRRREEEEEEEEERRRRRRRRRRRKKKKKKKKKLLLLLLLLAAAAANNNNNNNNFFFFFFFFFFFIIIIIIIIPPPPPPPWWWWWWWWWWWWWWGGGGPPPPPPPAAAAASSSSSSIIIIIIIIQQQQQQQQQVVVVVVVAAAAALLLLLLLLSSSSSSRRRRRRRRRRRKKKKKKKKKSSSSSSPPPPPPPYYYYYYYYYYYYLLLLLLLLPPPPPPPSSSSSSAAAAAHHHHHHHHHHRRRRRRRRRRRVVVVVVVSSSSSSGGGGLLLLLLLLMMMMMMMMMMMMMMMMAAAAANNNNNNNNHHHHHHHHHHTTTTTTTSSSSSSIIIIIIIISSSSSSSSSSSSLLLLLLLLFFFFFFFFFFFEEEEEEEEERRRRRRRRRRRTTTTTTTCCCCCCRRRRRRRRRRRQQQQQQQQQYYYYYYYYYYYYDDDDDDDDKKKKKKKKKLLLLLLLLRRRRRRRRRRRKKKKKKKKKRRRRRRRRRRREEEEEEEEEAAAAAFFFFFFFFFFFLLLLLLLLEEEEEEEEEQQQQQQQQQFFFFFFFFFFFRRRRRRRRRRRKKKKKKKKKEEEEEEEEEDDDDDDDDMMMMMMMMFFFFFFFFFFFKKKKKKKKKDDDDDDDDNNNNNNNNFFFFFFFFFFFDDDDDDDDEEEEEEEEEMMMMMMMMDDDDDDDDTTTTTTTSSSSSSRRRRRRRRRRREEEEEEEEEIIIIIIIIVVVVVVVQQQQQQQQQQQQQQQQQQLLLLLLLLIIIIIIIIDDDDDDDDEEEEEEEEEYYYYYYYYYYYYHHHHHHHHHHAAAAAAAAAATTTTTTTRRRRRRRRRRRPPPPPPPDDDDDDDDYYYYYYYYYYYYIIIIIIIISSSSSSWWWWWWWWWWWWWWGGGGTTTTTTTQQQQQQQQQEEEEEEEEEQQQQQQQQQQ

SEQ ID NO: 263 - protein, 3719 aa, Zea mays
MMMMMMMMPPPPPPPRRRRRRRRRRREEEEEEEEEIIIIIIIIIIIIIIIITTTTTTTIIIIIIIIQQQQQQQQQVVVVVVVGGGGQQQQQQQQQCCCCCCGGGGNNNNNNNNQQQQQQQQQIIIIIIIIGGGGMMMMMMMMEEEEEEEEEFFFFFFFFFFFWWWWWWWWWWWWWWKKKKKKKKKQQQQQQQQQLLLLLLLLCCCCCCLLLLLLLLEEEEEEEEEHHHHHHHHHHGGGGIIIIIIIIGGGGKKKKKKKKKDDDDDDDDGGGGLLLLLLLLLLLLLLLLEEEEEEEEEDDDDDDDDFFFFFFFFFFFAAAAATTTTTTTQQQQQQQQQGGGGGGGGDDDDDDDDRRRRRRRRRRRKKKKKKKKKDDDDDDDDVVVVVVVFFFFFFFFFFFFFFFFFFFFFFYYYYYYYYYYYYQQQQQQQQQAAAAADDDDDDDDDDDDDDDDQQQQQQQQQHHHHHHHHHHFFFFFFFFFFFIIIIIIIIPPPPPPPRRRRRRRRRRRSSSSSSLLLLLLLLLLLLLLLLIIIIIIIIDDDDDDDDLLLLLLLLEEEEEEEEEPPPPPPPRRRRRRRRRRRVVVVVVVIIIIIIIINNNNNNNNGGGGIIIIIIIIQQQQQQQQQNNNNNNNNSSSSSSEEEEEEEEEYYYYYYYYYYYYRRRRRRRRRRRNNNNNNNNLLLLLLLLYYYYYYYYYYYYNNNNNNNNHHHHHHHHHHEEEEEEEEENNNNNNNNIIIIIIIIFFFFFFFFFFFVVVVVVVAAAAAEEEEEEEEEHHHHHHHHHHGGGGGGGGGGGGAAAAAGGGGNNNNNNNNNNNNNNNNWWWWWWWWWWWWWWAAAAASSSSSSGGGGYYYYYYYYYYYYHHHHHHHHHHQQQQQQQQQGGGGEEEEEEEEEQQQQQQQQQFFFFFFFFFFFVVVVVVVDDDDDDDDDDDDDDDDIIIIIIIIMMMMMMMMDDDDDDDDMMMMMMMMVVVVVVVDDDDDDDDRRRRRRRRRRREEEEEEEEEAAAAADDDDDDDDGGGGSSSSSSDDDDDDDDSSSSSSLLLLLLLLEEEEEEEEEGGGGFFFFFFFFFFFVVVVVVVLLLLLLLLCCCCCCHHHHHHHHHHSSSSSSIIIIIIIIAAAAAGGGGGGGGTTTTTTTGGGGSSSSSSGGGGMMMMMMMMGGGGSSSSSSYYYYYYYYYYYYLLLLLLLLLLLLLLLLEEEEEEEEETTTTTTTLLLLLLLLNNNNNNNNDDDDDDDDRRRRRRRRRRRYYYYYYYYYYYYSSSSSSKKKKKKKKKKKKKKKKKKLLLLLLLLVVVVVVVQQQQQQQQQTTTTTTTYYYYYYYYYYYYSSSSSSVVVVVVVFFFFFFFFFFFPPPPPPPNNNNNNNNQQQQQQQQQVVVVVVVEEEEEEEEETTTTTTTSSSSSSDDDDDDDDVVVVVVVVVVVVVVVVVVVVVQQQQQQQQQPPPPPPPYYYYYYYYYYYYNNNNNNNNSSSSSSLLLLLLLLLLLLLLLLTTTTTTTLLLLLLLLKKKKKKKKKRRRRRRRRRRRLLLLLLLLTTTTTTTLLLLLLLLNNNNNNNNAAAAADDDDDDDDCCCCCCVVVVVVVVVVVVVVVVVVVVVLLLLLLLLDDDDDDDDNNNNNNNNTTTTTTTAAAAALLLLLLLLNNNNNNNNRRRRRRRRRRRIIIIIIIIAAAAAVVVVVVVEEEEEEEEERRRRRRRRRRRLLLLLLLLHHHHHHHHHHLLLLLLLLSSSSSSNNNNNNNNPPPPPPPTTTTTTTFFFFFFFFFFFAAAAAQQQQQQQQQTTTTTTTNNNNNNNNSSSSSSLLLLLLLLVVVVVVVSSSSSSTTTTTTTVVVVVVVMMMMMMMMSSSSSSAAAAASSSSSSTTTTTTTTTTTTTTTTTTTTTLLLLLLLLRRRRRRRRRRRYYYYYYYYYYYYPPPPPPPGGGGYYYYYYYYYYYYMMMMMMMMNNNNNNNNNNNNNNNNDDDDDDDDLLLLLLLLVVVVVVVGGGGLLLLLLLLLLLLLLLLAAAAASSSSSSLLLLLLLLIIIIIIIIPPPPPPPTTTTTTTPPPPPPPRRRRRRRRRRRCCCCCCHHHHHHHHHHFFFFFFFFFFFLLLLLLLLMMMMMMMMTTTTTTTGGGGYYYYYYYYYYYYTTTTTTTPPPPPPPLLLLLLLLTTTTTTTVVVVVVVEEEEEEEEERRRRRRRRRRRQQQQQQQQQVVVVVVVNNNNNNNNMMMMMMMMIIIIIIIIRRRRRRRRRRRKKKKKKKKKTTTTTTTTTTTTTTVVVVVVVLLLLLLLLDDDDDDDDVVVVVVVMMMMMMMMRRRRRRRRRRRRRRRRRRRRRRLLLLLLLLLLLLLLLLQQQQQQQQQTTTTTTTKKKKKKKKKNNNNNNNNIIIIIIIIMMMMMMMMVVVVVVVSSSSSSSSSSSSYYYYYYYYYYYYAAAAARRRRRRRRRRRTTTTTTTKKKKKKKKKEEEEEEEEEAAAAASSSSSSQQQQQQQQQAAAAAKKKKKKKKKYYYYYYYYYYYYIIIIIIIISSSSSSIIIIIIIILLLLLLLLNNNNNNNNIIIIIIIIIIIIIIIIQQQQQQQQQGGGGEEEEEEEEEVVVVVVVDDDDDDDDPPPPPPPTTTTTTTQQQQQQQQQVVVVVVVHHHHHHHHHHEEEEEEEEESSSSSSLLLLLLLLQQQQQQQQQRRRRRRRRRRRIIIIIIIIRRRRRRRRRRREEEEEEEEERRRRRRRRRRRKKKKKKKKKLLLLLLLLVVVVVVVNNNNNNNNFFFFFFFFFFFIIIIIIIIYYYYYYYYYYYYWWWWWWWWWWWWWWAAAAAPPPPPPPAAAAASSSSSSIIIIIIIIQQQQQQQQQVVVVVVVAAAAALLLLLLLLSSSSSSRRRRRRRRRRRKKKKKKKKKSSSSSSPPPPPPPYYYYYYYYYYYYVVVVVVVQQQQQQQQQTTTTTTTTTTTTTTHHHHHHHHHHRRRRRRRRRRRVVVVVVVSSSSSSGGGGLLLLLLLLMMMMMMMMLLLLLLLLAAAAANNNNNNNNHHHHHHHHHHTTTTTTTSSSSSSIIIIIIIIRRRRRRRRRRRHHHHHHHHHHLLLLLLLLFFFFFFFFFFFSSSSSSKKKKKKKKKCCCCCCLLLLLLLLGGGGQQQQQQQQQYYYYYYYYYYYYEEEEEEEEEKKKKKKKKKLLLLLLLLRRRRRRRRRRRKKKKKKKKKKKKKKKKKKQQQQQQQQQAAAAAFFFFFFFFFFFLLLLLLLLDDDDDDDDNNNNNNNNYYYYYYYYYYYYRRRRRRRRRRRKKKKKKKKKFFFFFFFFFFFPPPPPPPMMMMMMMMFFFFFFFFFFFAAAAADDDDDDDDNNNNNNNNDDDDDDDDLLLLLLLLSSSSSSEEEEEEEEEFFFFFFFFFFFDDDDDDDDEEEEEEEEESSSSSSRRRRRRRRRRREEEEEEEEEIIIIIIIIIIIIIIIIEEEEEEEEESSSSSSLLLLLLLLVVVVVVVDDDDDDDDEEEEEEEEEYYYYYYYYYYYYKKKKKKKKKAAAAACCCCCCEEEEEEEEESSSSSSPPPPPPPDDDDDDDDYYYYYYYYYYYYIIIIIIIIKKKKKKKKKWWWWWWWWWWWWWWGGGGMMMMMMMMEEEEEEEEEDDDDDDDDPPPPPPPGGGGEEEEEEEEEAAAAANNNNNNNNVVVVVVVVVVVVVVAAAAAAAAAALLLLLLLLDDDDDDDDSSSSSSKKKKKKKKKLLLLLLLLVVVVVVVVVVVVVVV

SEQ ID NO: 264 - protein, 3595 aa, Mus musculus
MMMMMMMMPPPPPPPRRRRRRRRRRREEEEEEEEEIIIIIIIIIIIIIIIITTTTTTTLLLLLLLLQQQQQQQQQLLLLLLLLGGGGQQQQQQQQQCCCCCCGGGGNNNNNNNNQQQQQQQQQIIIIIIIIGGGGFFFFFFFFFFFEEEEEEEEEFFFFFFFFFFFWWWWWWWWWWWWWWKKKKKKKKKQQQQQQQQQLLLLLLLLCCCCCCAAAAAEEEEEEEEEHHHHHHHHHHGGGGIIIIIIIISSSSSSPPPPPPPEEEEEEEEEGGGGIIIIIIIIVVVVVVVEEEEEEEEEEEEEEEEEEFFFFFFFFFFFAAAAATTTTTTTEEEEEEEEEGGGGTTTTTTTDDDDDDDDRRRRRRRRRRRKKKKKKKKKDDDDDDDDVVVVVVVFFFFFFFFFFFFFFFFFFFFFFYYYYYYYYYYYYQQQQQQQQQAAAAADDDDDDDDDDDDDDDDEEEEEEEEEHHHHHHHHHHYYYYYYYYYYYYIIIIIIIIPPPPPPPRRRRRRRRRRRAAAAAVVVVVVVLLLLLLLLLLLLLLLLDDDDDDDDLLLLLLLLEEEEEEEEEPPPPPPPRRRRRRRRRRRVVVVVVVIIIIIIIIHHHHHHHHHHSSSSSSIIIIIIIILLLLLLLLNNNNNNNNSSSSSSSSSSSSYYYYYYYYYYYYAAAAAKKKKKKKKKLLLLLLLLYYYYYYYYYYYYNNNNNNNNPPPPPPPEEEEEEEEENNNNNNNNIIIIIIIIYYYYYYYYYYYYLLLLLLLLSSSSSSEEEEEEEEEHHHHHHHHHHGGGGGGGGGGGGAAAAAGGGGNNNNNNNNNNNNNNNNWWWWWWWWWWWWWWAAAAASSSSSSGGGGFFFFFFFFFFFSSSSSSQQQQQQQQQGGGGEEEEEEEEEKKKKKKKKKIIIIIIIIHHHHHHHHHHEEEEEEEEEDDDDDDDDIIIIIIIIFFFFFFFFFFFDDDDDDDDIIIIIIIIIIIIIIIIDDDDDDDDRRRRRRRRRRREEEEEEEEEAAAAADDDDDDDDGGGGSSSSSSDDDDDDDDSSSSSSLLLLLLLLEEEEEEEEEGGGGFFFFFFFFFFFVVVVVVVLLLLLLLLCCCCCCHHHHHHHHHHSSSSSSIIIIIIIIAAAAAGGGGGGGGTTTTTTTGGGGSSSSSSGGGGLLLLLLLLGGGGSSSSSSYYYYYYYYYYYYLLLLLLLLLLLLLLLLEEEEEEEEERRRRRRRRRRRLLLLLLLLNNNNNNNNDDDDDDDDRRRRRRRRRRRYYYYYYYYYYYYPPPPPPPKKKKKKKKKKKKKKKKKKLLLLLLLLVVVVVVVQQQQQQQQQTTTTTTTYYYYYYYYYYYYSSSSSSVVVVVVVFFFFFFFFFFFPPPPPPPNNNNNNNNQQQQQQQQQDDDDDDDDEEEEEEEEEMMMMMMMMSSSSSSDDDDDDDDVVVVVVVVVVVVVVVVVVVVVQQQQQQQQQPPPPPPPYYYYYYYYYYYYNNNNNNNNSSSSSSLLLLLLLLLLLLLLLLTTTTTTTLLLLLLLLKKKKKKKKKRRRRRRRRRRRLLLLLLLLTTTTTTTQQQQQQQQQNNNNNNNNAAAAADDDDDDDDCCCCCCVVVVVVVVVVVVVVVVVVVVVLLLLLLLLDDDDDDDDNNNNNNNNTTTTTTTAAAAALLLLLLLLNNNNNNNNLLLLLLLLIIIIIIIIAAAAATTTTTTTDDDDDDDDRRRRRRRRRRRLLLLLLLLHHHHHHHHHHIIIIIIIIQQQQQQQQQNNNNNNNNPPPPPPPSSSSSSFFFFFFFFFFFSSSSSSQQQQQQQQQIIIIIIIINNNNNNNNQQQQQQQQQLLLLLLLLVVVVVVVSSSSSSTTTTTTTIIIIIIIIMMMMMMMMSSSSSSAAAAASSSSSSTTTTTTTTTTTTTTTTTTTTTLLLLLLLLRRRRRRRRRRRYYYYYYYYYYYYPPPPPPPGGGGYYYYYYYYYYYYMMMMMMMMNNNNNNNNNNNNNNNNDDDDDDDDLLLLLLLLIIIIIIIIGGGGLLLLLLLLIIIIIIIIAAAAASSSSSSLLLLLLLLIIIIIIIIPPPPPPPTTTTTTTPPPPPPPRRRRRRRRRRRLLLLLLLLHHHHHHHHHHFFFFFFFFFFFLLLLLLLLMMMMMMMMTTTTTTTGGGGYYYYYYYYYYYYTTTTTTTPPPPPPPLLLLLLLLTTTTTTTTTTTTTTDDDDDDDDQQQQQQQQQSSSSSSVVVVVVVAAAAASSSSSSVVVVVVVRRRRRRRRRRRKKKKKKKKKTTTTTTTTTTTTTTVVVVVVVLLLLLLLLDDDDDDDDVVVVVVVMMMMMMMMRRRRRRRRRRRRRRRRRRRRRRLLLLLLLLLLLLLLLLQQQQQQQQQPPPPPPPKKKKKKKKKNNNNNNNNVVVVVVVMMMMMMMMVVVVVVVSSSSSSTTTTTTTGGGGRRRRRRRRRRRDDDDDDDDRRRRRRRRRRRQQQQQQQQQTTTTTTTNNNNNNNNHHHHHHHHHHCCCCCCYYYYYYYYYYYYIIIIIIIIAAAAAIIIIIIIILLLLLLLLNNNNNNNNIIIIIIIIIIIIIIIIQQQQQQQQQGGGGEEEEEEEEEVVVVVVVDDDDDDDDPPPPPPPTTTTTTTQQQQQQQQQVVVVVVVHHHHHHHHHHKKKKKKKKKSSSSSSLLLLLLLLQQQQQQQQQRRRRRRRRRRRIIIIIIIIRRRRRRRRRRREEEEEEEEERRRRRRRRRRRKKKKKKKKKLLLLLLLLAAAAANNNNNNNNFFFFFFFFFFFIIIIIIIIPPPPPPPWWWWWWWWWWWWWWGGGGPPPPPPPAAAAASSSSSSIIIIIIIIQQQQQQQQQVVVVVVVAAAAALLLLLLLLSSSSSSRRRRRRRRRRRKKKKKKKKKSSSSSSPPPPPPPYYYYYYYYYYYYLLLLLLLLPPPPPPPSSSSSSAAAAAHHHHHHHHHHRRRRRRRRRRRVVVVVVVSSSSSSGGGGLLLLLLLLMMMMMMMMMMMMMMMMAAAAANNNNNNNNHHHHHHHHHHTTTTTTTSSSSSSIIIIIIIISSSSSSSSSSSSLLLLLLLLFFFFFFFFFFFEEEEEEEEERRRRRRRRRRRTTTTTTTCCCCCCRRRRRRRRRRRQQQQQQQQQFFFFFFFFFFFDDDDDDDDKKKKKKKKKLLLLLLLLRRRRRRRRRRRKKKKKKKKKRRRRRRRRRRREEEEEEEEEAAAAAFFFFFFFFFFFMMMMMMMMEEEEEEEEEQQQQQQQQQFFFFFFFFFFFRRRRRRRRRRRKKKKKKKKKEEEEEEEEEDDDDDDDDIIIIIIIIFFFFFFFFFFFKKKKKKKKKDDDDDDDDNNNNNNNNFFFFFFFFFFFDDDDDDDDEEEEEEEEEMMMMMMMMDDDDDDDDTTTTTTTSSSSSSRRRRRRRRRRREEEEEEEEEIIIIIIIIVVVVVVVQQQQQQQQQQQQQQQQQQLLLLLLLLIIIIIIIIDDDDDDDDEEEEEEEEEYYYYYYYYYYYYHHHHHHHHHHAAAAAAAAAATTTTTTTRRRRRRRRRRRPPPPPPPDDDDDDDDYYYYYYYYYYYYIIIIIIIISSSSSSWWWWWWWWWWWWWWGGGGTTTTTTTQQQQQQQQQEEEEEEEEEQQQQQQQQQQ

SEQ ID NO: 265 - protein, 3741 aa, Arabidopsis thaliana
MMMMMMMMPPPPPPPRRRRRRRRRRREEEEEEEEEIIIIIIIIIIIIIIIITTTTTTTLLLLLLLLQQQQQQQQQVVVVVVVGGGGQQQQQQQQQCCCCCCGGGGNNNNNNNNQQQQQQQQQIIIIIIIIGGGGMMMMMMMMEEEEEEEEEFFFFFFFFFFFWWWWWWWWWWWWWWKKKKKKKKKQQQQQQQQQLLLLLLLLCCCCCCLLLLLLLLEEEEEEEEEHHHHHHHHHHGGGGIIIIIIIISSSSSSKKKKKKKKKDDDDDDDDGGGGIIIIIIIILLLLLLLLEEEEEEEEEDDDDDDDDFFFFFFFFFFFAAAAATTTTTTTQQQQQQQQQGGGGGGGGDDDDDDDDRRRRRRRRRRRKKKKKKKKKDDDDDDDDVVVVVVVFFFFFFFFFFFFFFFFFFFFFFYYYYYYYYYYYYQQQQQQQQQAAAAADDDDDDDDDDDDDDDDQQQQQQQQQHHHHHHHHHHYYYYYYYYYYYYIIIIIIIIPPPPPPPRRRRRRRRRRRAAAAALLLLLLLLLLLLLLLLIIIIIIIIDDDDDDDDLLLLLLLLEEEEEEEEEPPPPPPPRRRRRRRRRRRVVVVVVVIIIIIIIINNNNNNNNGGGGIIIIIIIIQQQQQQQQQNNNNNNNNGGGGEEEEEEEEEYYYYYYYYYYYYRRRRRRRRRRRNNNNNNNNLLLLLLLLYYYYYYYYYYYYNNNNNNNNHHHHHHHHHHEEEEEEEEENNNNNNNNIIIIIIIIFFFFFFFFFFFLLLLLLLLSSSSSSDDDDDDDDHHHHHHHHHHGGGGGGGGGGGGAAAAAGGGGNNNNNNNNNNNNNNNNWWWWWWWWWWWWWWAAAAASSSSSSGGGGYYYYYYYYYYYYHHHHHHHHHHQQQQQQQQQGGGGKKKKKKKKKGGGGVVVVVVVEEEEEEEEEEEEEEEEEEEEEEEEEEEIIIIIIIIMMMMMMMMDDDDDDDDMMMMMMMMIIIIIIIIDDDDDDDDRRRRRRRRRRREEEEEEEEEAAAAADDDDDDDDGGGGSSSSSSDDDDDDDDSSSSSSLLLLLLLLEEEEEEEEEGGGGFFFFFFFFFFFVVVVVVVLLLLLLLLCCCCCCHHHHHHHHHHSSSSSSIIIIIIIIAAAAAGGGGGGGGTTTTTTTGGGGSSSSSSGGGGMMMMMMMMGGGGSSSSSSYYYYYYYYYYYYLLLLLLLLLLLLLLLLEEEEEEEEETTTTTTTLLLLLLLLNNNNNNNNDDDDDDDDRRRRRRRRRRRYYYYYYYYYYYYSSSSSSKKKKKKKKKKKKKKKKKKLLLLLLLLVVVVVVVQQQQQQQQQTTTTTTTYYYYYYYYYYYYSSSSSSVVVVVVVFFFFFFFFFFFPPPPPPPNNNNNNNNQQQQQQQQQMMMMMMMMEEEEEEEEETTTTTTTSSSSSSDDDDDDDDVVVVVVVVVVVVVVVVVVVVVQQQQQQQQQPPPPPPPYYYYYYYYYYYYNNNNNNNNSSSSSSLLLLLLLLLLLLLLLLTTTTTTTLLLLLLLLKKKKKKKKKRRRRRRRRRRRLLLLLLLLTTTTTTTLLLLLLLLNNNNNNNNAAAAADDDDDDDDCCCCCCVVVVVVVVVVVVVVVVVVVVVLLLLLLLLDDDDDDDDNNNNNNNNTTTTTTTAAAAALLLLLLLLNNNNNNNNRRRRRRRRRRRIIIIIIIIAAAAAVVVVVVVEEEEEEEEERRRRRRRRRRRLLLLLLLLHHHHHHHHHHLLLLLLLLTTTTTTTNNNNNNNNPPPPPPPTTTTTTTFFFFFFFFFFFAAAAAQQQQQQQQQTTTTTTTNNNNNNNNSSSSSSLLLLLLLLVVVVVVVSSSSSSTTTTTTTVVVVVVVMMMMMMMMSSSSSSAAAAASSSSSSTTTTTTTTTTTTTTTTTTTTTLLLLLLLLRRRRRRRRRRRYYYYYYYYYYYYPPPPPPPGGGGYYYYYYYYYYYYMMMMMMMMNNNNNNNNNNNNNNNNDDDDDDDDLLLLLLLLVVVVVVVGGGGLLLLLLLLLLLLLLLLAAAAASSSSSSLLLLLLLLIIIIIIIIPPPPPPPTTTTTTTPPPPPPPRRRRRRRRRRRCCCCCCHHHHHHHHHHFFFFFFFFFFFLLLLLLLLMMMMMMMMTTTTTTTGGGGYYYYYYYYYYYYTTTTTTTPPPPPPPLLLLLLLLTTTTTTTVVVVVVVEEEEEEEEERRRRRRRRRRRQQQQQQQQQAAAAANNNNNNNNVVVVVVVIIIIIIIIRRRRRRRRRRRKKKKKKKKKTTTTTTTTTTTTTTVVVVVVVLLLLLLLLDDDDDDDDVVVVVVVMMMMMMMMRRRRRRRRRRRRRRRRRRRRRRLLLLLLLLLLLLLLLLQQQQQQQQQTTTTTTTKKKKKKKKKNNNNNNNNIIIIIIIIMMMMMMMMVVVVVVVSSSSSSSSSSSSYYYYYYYYYYYYAAAAARRRRRRRRRRRNNNNNNNNKKKKKKKKKEEEEEEEEEAAAAASSSSSSQQQQQQQQQAAAAAKKKKKKKKKYYYYYYYYYYYYIIIIIIIISSSSSSIIIIIIIILLLLLLLLNNNNNNNNIIIIIIIIIIIIIIIIQQQQQQQQQGGGGEEEEEEEEEVVVVVVVDDDDDDDDPPPPPPPTTTTTTTQQQQQQQQQVVVVVVVHHHHHHHHHHEEEEEEEEESSSSSSLLLLLLLLQQQQQQQQQRRRRRRRRRRRIIIIIIIIRRRRRRRRRRREEEEEEEEERRRRRRRRRRRKKKKKKKKKLLLLLLLLVVVVVVVNNNNNNNNFFFFFFFFFFFIIIIIIIIDDDDDDDDWWWWWWWWWWWWWWGGGGPPPPPPPAAAAASSSSSSIIIIIIIIQQQQQQQQQVVVVVVVAAAAALLLLLLLLSSSSSSKKKKKKKKKKKKKKKKKKSSSSSSPPPPPPPYYYYYYYYYYYYVVVVVVVQQQQQQQQQTTTTTTTSSSSSSHHHHHHHHHHRRRRRRRRRRRVVVVVVVSSSSSSGGGGLLLLLLLLMMMMMMMMLLLLLLLLAAAAASSSSSSHHHHHHHHHHTTTTTTTSSSSSSIIIIIIIIRRRRRRRRRRRHHHHHHHHHHLLLLLLLLFFFFFFFFFFFSSSSSSRRRRRRRRRRRCCCCCCLLLLLLLLSSSSSSQQQQQQQQQYYYYYYYYYYYYDDDDDDDDKKKKKKKKKLLLLLLLLRRRRRRRRRRRKKKKKKKKKKKKKKKKKKQQQQQQQQQAAAAAFFFFFFFFFFFLLLLLLLLDDDDDDDDNNNNNNNNYYYYYYYYYYYYRRRRRRRRRRRKKKKKKKKKFFFFFFFFFFFPPPPPPPMMMMMMMMFFFFFFFFFFFAAAAADDDDDDDDNNNNNNNNDDDDDDDDLLLLLLLLSSSSSSEEEEEEEEEFFFFFFFFFFFDDDDDDDDEEEEEEEEESSSSSSRRRRRRRRRRRDDDDDDDDIIIIIIIIIIIIIIIIEEEEEEEEESSSSSSLLLLLLLLVVVVVVVDDDDDDDDEEEEEEEEEYYYYYYYYYYYYKKKKKKKKKAAAAACCCCCCEEEEEEEEESSSSSSPPPPPPPDDDDDDDDYYYYYYYYYYYYIIIIIIIIKKKKKKKKKWWWWWWWWWWWWWWGGGGMMMMMMMMEEEEEEEEEDDDDDDDDPPPPPPPGGGGQQQQQQQQQLLLLLLLLMMMMMMMMTTTTTTTGGGGEEEEEEEEEGGGGNNNNNNNNAAAAASSSSSSGGGGVVVVVVVAAAAADDDDDDDDPPPPPPPKKKKKKKKKLLLLLLLLAAAAAFFFFFFFFFFFF

SEQ ID NO: 266 - protein, 3601 aa, Drosophila melanogaster
MMMMMMMMPPPPPPPSSSSSSEEEEEEEEEIIIIIIIIIIIIIIIITTTTTTTLLLLLLLLQQQQQQQQQLLLLLLLLGGGGQQQQQQQQQCCCCCCGGGGNNNNNNNNQQQQQQQQQIIIIIIIIGGGGFFFFFFFFFFFEEEEEEEEEFFFFFFFFFFFWWWWWWWWWWWWWWKKKKKKKKKRRRRRRRRRRRLLLLLLLLCCCCCCLLLLLLLLEEEEEEEEEHHHHHHHHHHGGGGIIIIIIIISSSSSSPPPPPPPDDDDDDDDGGGGVVVVVVVLLLLLLLLEEEEEEEEEDDDDDDDDFFFFFFFFFFFAAAAATTTTTTTDDDDDDDDGGGGQQQQQQQQQDDDDDDDDRRRRRRRRRRRKKKKKKKKKDDDDDDDDVVVVVVVFFFFFFFFFFFFFFFFFFFFFFYYYYYYYYYYYYQQQQQQQQQAAAAADDDDDDDDDDDDDDDDNNNNNNNNHHHHHHHHHHYYYYYYYYYYYYIIIIIIIIPPPPPPPRRRRRRRRRRRAAAAAVVVVVVVLLLLLLLLIIIIIIIIDDDDDDDDLLLLLLLLEEEEEEEEEPPPPPPPRRRRRRRRRRRVVVVVVVIIIIIIIINNNNNNNNNNNNNNNNIIIIIIIIMMMMMMMMTTTTTTTSSSSSSPPPPPPPYYYYYYYYYYYYSSSSSSKKKKKKKKKLLLLLLLLYYYYYYYYYYYYNNNNNNNNQQQQQQQQQEEEEEEEEENNNNNNNNVVVVVVVFFFFFFFFFFFLLLLLLLLSSSSSSKKKKKKKKKHHHHHHHHHHGGGGGGGGGGGGAAAAAGGGGNNNNNNNNNNNNNNNNWWWWWWWWWWWWWWAAAAASSSSSSGGGGFFFFFFFFFFFSSSSSSQQQQQQQQQGGGGEEEEEEEEEKKKKKKKKKVVVVVVVQQQQQQQQQEEEEEEEEEEEEEEEEEEVVVVVVVFFFFFFFFFFFDDDDDDDDIIIIIIIILLLLLLLLDDDDDDDDRRRRRRRRRRREEEEEEEEEAAAAADDDDDDDDGGGGSSSSSSDDDDDDDDSSSSSSLLLLLLLLEEEEEEEEEGGGGFFFFFFFFFFFVVVVVVVLLLLLLLLCCCCCCHHHHHHHHHHSSSSSSIIIIIIIIAAAAAGGGGGGGGTTTTTTTGGGGSSSSSSGGGGMMMMMMMMGGGGSSSSSSYYYYYYYYYYYYVVVVVVVLLLLLLLLEEEEEEEEERRRRRRRRRRRLLLLLLLLSSSSSSEEEEEEEEERRRRRRRRRRRFFFFFFFFFFFPPPPPPPKKKKKKKKKKKKKKKKKKLLLLLLLLIIIIIIIIQQQQQQQQQTTTTTTTYYYYYYYYYYYYSSSSSSVVVVVVVFFFFFFFFFFFPPPPPPPNNNNNNNNQQQQQQQQQDDDDDDDDEEEEEEEEEIIIIIIIISSSSSSDDDDDDDDVVVVVVVVVVVVVVVVVVVVVQQQQQQQQQPPPPPPPYYYYYYYYYYYYNNNNNNNNSSSSSSIIIIIIIILLLLLLLLTTTTTTTLLLLLLLLKKKKKKKKKRRRRRRRRRRRLLLLLLLLTTTTTTTKKKKKKKKKCCCCCCAAAAADDDDDDDDSSSSSSVVVVVVVVVVVVVVVVVVVVVLLLLLLLLDDDDDDDDNNNNNNNNTTTTTTTAAAAALLLLLLLLNNNNNNNNRRRRRRRRRRRIIIIIIIIAAAAATTTTTTTEEEEEEEEERRRRRRRRRRRLLLLLLLLHHHHHHHHHHIIIIIIIIQQQQQQQQQTTTTTTTPPPPPPPTTTTTTTFFFFFFFFFFFTTTTTTTQQQQQQQQQIIIIIIIINNNNNNNNNNNNNNNNLLLLLLLLVVVVVVVSSSSSSTTTTTTTIIIIIIIIMMMMMMMMSSSSSSLLLLLLLLSSSSSSTTTTTTTTTTTTTTTTTTTTTLLLLLLLLRRRRRRRRRRRYYYYYYYYYYYYPPPPPPPSSSSSSYYYYYYYYYYYYMMMMMMMMNNNNNNNNNNNNNNNNNNNNNNNNLLLLLLLLIIIIIIIIGGGGLLLLLLLLTTTTTTTAAAAASSSSSSLLLLLLLLIIIIIIIIPPPPPPPTTTTTTTPPPPPPPQQQQQQQQQLLLLLLLLHHHHHHHHHHFFFFFFFFFFFLLLLLLLLMMMMMMMMTTTTTTTGGGGYYYYYYYYYYYYTTTTTTTPPPPPPPLLLLLLLLMMMMMMMMSSSSSSDDDDDDDDCCCCCCEEEEEEEEEAAAAAKKKKKKKKKTTTTTTTSSSSSSVVVVVVVRRRRRRRRRRRKKKKKKKKKTTTTTTTTTTTTTTVVVVVVVLLLLLLLLDDDDDDDDVVVVVVVMMMMMMMMRRRRRRRRRRRRRRRRRRRRRRLLLLLLLLLLLLLLLLQQQQQQQQQPPPPPPPKKKKKKKKKNNNNNNNNMMMMMMMMMMMMMMMMVVVVVVVSSSSSSAAAAALLLLLLLLTTTTTTTDDDDDDDDKKKKKKKKKQQQQQQQQQSSSSSSRRRRRRRRRRRQQQQQQQQQCCCCCCFFFFFFFFFFFVVVVVVVSSSSSSIIIIIIIILLLLLLLLNNNNNNNNIIIIIIIIIIIIIIIIQQQQQQQQQGGGGEEEEEEEEEVVVVVVVDDDDDDDDPPPPPPPSSSSSSQQQQQQQQQVVVVVVVHHHHHHHHHHKKKKKKKKKSSSSSSLLLLLLLLQQQQQQQQQRRRRRRRRRRRIIIIIIIIRRRRRRRRRRREEEEEEEEERRRRRRRRRRRKKKKKKKKKLLLLLLLLAAAAANNNNNNNNFFFFFFFFFFFIIIIIIIIPPPPPPPWWWWWWWWWWWWWWGGGGPPPPPPPAAAAASSSSSSIIIIIIIIQQQQQQQQQVVVVVVVAAAAALLLLLLLLPPPPPPPRRRRRRRRRRRSSSSSSSSSSSSPPPPPPPYYYYYYYYYYYYVVVVVVVQQQQQQQQQSSSSSSAAAAAHHHHHHHHHHKKKKKKKKKVVVVVVVSSSSSSGGGGLLLLLLLLMMMMMMMMMMMMMMMMAAAAANNNNNNNNHHHHHHHHHHTTTTTTTGGGGIIIIIIIISSSSSSSSSSSSLLLLLLLLFFFFFFFFFFFKKKKKKKKKRRRRRRRRRRRAAAAALLLLLLLLAAAAAQQQQQQQQQYYYYYYYYYYYYDDDDDDDDKKKKKKKKKLLLLLLLLRRRRRRRRRRRKKKKKKKKKRRRRRRRRRRRNNNNNNNNAAAAAFFFFFFFFFFFLLLLLLLLDDDDDDDDNNNNNNNNFFFFFFFFFFFRRRRRRRRRRRRRRRRRRRRRREEEEEEEEESSSSSSMMMMMMMMFFFFFFFFFFFQQQQQQQQQDDDDDDDDDDDDDDDDLLLLLLLLTTTTTTTEEEEEEEEELLLLLLLLDDDDDDDDIIIIIIIIAAAAARRRRRRRRRRRDDDDDDDDTTTTTTTVVVVVVVDDDDDDDDCCCCCCLLLLLLLLVVVVVVVQQQQQQQQQEEEEEEEEEYYYYYYYYYYYYEEEEEEEEEAAAAAAAAAATTTTTTTQQQQQQQQQIIIIIIIIDDDDDDDDYYYYYYYYYYYYPPPPPPPQQQQQQQQQWWWWWWWWWWWWWWSSSSSSPPPPPPPAAAAAVVVVVVVEEEEEEEEEAAAAASSSSSSKKKKKKKKKAAAAAGGGGG

SEQ ID NO: 267 - protein, 3660 aa, Monoeuplotes crassus
MMMMMMMMPPPPPPPRRRRRRRRRRREEEEEEEEEIIIIIIIIIIIIIIIITTTTTTTCCCCCCQQQQQQQQQVVVVVVVGGGGQQQQQQQQQCCCCCCGGGGNNNNNNNNQQQQQQQQQIIIIIIIIGGGGMMMMMMMMEEEEEEEEEFFFFFFFFFFFWWWWWWWWWWWWWWKKKKKKKKKQQQQQQQQQLLLLLLLLCCCCCCMMMMMMMMEEEEEEEEEHHHHHHHHHHGGGGIIIIIIIISSSSSSPPPPPPPEEEEEEEEEGGGGIIIIIIIILLLLLLLLEEEEEEEEEEEEEEEEEEYYYYYYYYYYYYAAAAALLLLLLLLDDDDDDDDGGGGEEEEEEEEEDDDDDDDDRRRRRRRRRRRKKKKKKKKKDDDDDDDDVVVVVVVFFFFFFFFFFFFFFFFFFFFFFYYYYYYYYYYYYQQQQQQQQQAAAAADDDDDDDDDDDDDDDDEEEEEEEEEHHHHHHHHHHYYYYYYYYYYYYVVVVVVVPPPPPPPRRRRRRRRRRRAAAAAVVVVVVVLLLLLLLLIIIIIIIIDDDDDDDDLLLLLLLLEEEEEEEEEPPPPPPPGGGGVVVVVVVIIIIIIIIKKKKKKKKKQQQQQQQQQIIIIIIIIQQQQQQQQQNNNNNNNNSSSSSSPPPPPPPYYYYYYYYYYYYSSSSSSNNNNNNNNLLLLLLLLYYYYYYYYYYYYNNNNNNNNPPPPPPPEEEEEEEEENNNNNNNNFFFFFFFFFFFFFFFFFFFFFFVVVVVVVSSSSSSKKKKKKKKKTTTTTTTMMMMMMMMDDDDDDDDGGGGAAAAAGGGGNNNNNNNNNNNNNNNNWWWWWWWWWWWWWWAAAAAKKKKKKKKKGGGGYYYYYYYYYYYYCCCCCCEEEEEEEEEGGGGAAAAAKKKKKKKKKYYYYYYYYYYYYEEEEEEEEEEEEEEEEEEEEEEEEEEEIIIIIIIIIIIIIIIIEEEEEEEEEMMMMMMMMIIIIIIIIDDDDDDDDRRRRRRRRRRREEEEEEEEEAAAAADDDDDDDDGGGGSSSSSSDDDDDDDDSSSSSSLLLLLLLLEEEEEEEEEGGGGFFFFFFFFFFFVVVVVVVLLLLLLLLTTTTTTTHHHHHHHHHHSSSSSSIIIIIIIIAAAAAGGGGGGGGTTTTTTTGGGGSSSSSSGGGGFFFFFFFFFFFGGGGSSSSSSYYYYYYYYYYYYLLLLLLLLLLLLLLLLEEEEEEEEEKKKKKKKKKLLLLLLLLNNNNNNNNDDDDDDDDHHHHHHHHHHYYYYYYYYYYYYPPPPPPPKKKKKKKKKKKKKKKKKKLLLLLLLLVVVVVVVQQQQQQQQQTTTTTTTYYYYYYYYYYYYSSSSSSVVVVVVVFFFFFFFFFFFPPPPPPPNNNNNNNNDDDDDDDDNNNNNNNNDDDDDDDDIIIIIIIIVVVVVVVVVVVVVVQQQQQQQQQPPPPPPPYYYYYYYYYYYYNNNNNNNNCCCCCCIIIIIIIILLLLLLLLSSSSSSMMMMMMMMKKKKKKKKKRRRRRRRRRRRLLLLLLLLVVVVVVVLLLLLLLLNNNNNNNNAAAAADDDDDDDDCCCCCCVVVVVVVVVVVVVVVVVVVVVLLLLLLLLDDDDDDDDNNNNNNNNTTTTTTTAAAAAIIIIIIIITTTTTTTSSSSSSIIIIIIIIAAAAAVVVVVVVDDDDDDDDRRRRRRRRRRRLLLLLLLLKKKKKKKKKLLLLLLLLLLLLLLLLHHHHHHHHHHPPPPPPPTTTTTTTIIIIIIIISSSSSSQQQQQQQQQVVVVVVVNNNNNNNNSSSSSSIIIIIIIIVVVVVVVSSSSSSTTTTTTTVVVVVVVMMMMMMMMAAAAAAAAAASSSSSSTTTTTTTTTTTTTTTTTTTTTLLLLLLLLRRRRRRRRRRRYYYYYYYYYYYYPPPPPPPGGGGYYYYYYYYYYYYMMMMMMMMNNNNNNNNNNNNNNNNDDDDDDDDLLLLLLLLVVVVVVVGGGGLLLLLLLLIIIIIIIIAAAAASSSSSSLLLLLLLLVVVVVVVPPPPPPPTTTTTTTPPPPPPPRRRRRRRRRRRCCCCCCHHHHHHHHHHFFFFFFFFFFFLLLLLLLLMMMMMMMMTTTTTTTGGGGYYYYYYYYYYYYTTTTTTTPPPPPPPLLLLLLLLSSSSSSLLLLLLLLNNNNNNNNDDDDDDDDQQQQQQQQQKKKKKKKKKVVVVVVVSSSSSSSSSSSSIIIIIIIIRRRRRRRRRRRKKKKKKKKKTTTTTTTTTTTTTTVVVVVVVLLLLLLLLDDDDDDDDVVVVVVVMMMMMMMMRRRRRRRRRRRRRRRRRRRRRRLLLLLLLLLLLLLLLLQQQQQQQQQTTTTTTTRRRRRRRRRRRNNNNNNNNIIIIIIIIMMMMMMMMTTTTTTTSSSSSSGGGGAAAAAIIIIIIIIKKKKKKKKKKKKKKKKKKGGGGAAAAAYYYYYYYYYYYYMMMMMMMMSSSSSSIIIIIIIILLLLLLLLNNNNNNNNIIIIIIIIIIIIIIIIQQQQQQQQQGGGGDDDDDDDDVVVVVVVDDDDDDDDPPPPPPPTTTTTTTQQQQQQQQQVVVVVVVHHHHHHHHHHKKKKKKKKKSSSSSSLLLLLLLLQQQQQQQQQRRRRRRRRRRRIIIIIIIIRRRRRRRRRRREEEEEEEEERRRRRRRRRRRNNNNNNNNVVVVVVVAAAAANNNNNNNNFFFFFFFFFFFIIIIIIIIPPPPPPPWWWWWWWWWWWWWWGGGGPPPPPPPAAAAASSSSSSIIIIIIIIQQQQQQQQQVVVVVVVAAAAALLLLLLLLSSSSSSKKKKKKKKKKKKKKKKKKSSSSSSPPPPPPPYYYYYYYYYYYYIIIIIIIIEEEEEEEEESSSSSSDDDDDDDDNNNNNNNNKKKKKKKKKVVVVVVVSSSSSSGGGGLLLLLLLLMMMMMMMMLLLLLLLLAAAAANNNNNNNNHHHHHHHHHHTTTTTTTGGGGIIIIIIIIRRRRRRRRRRRSSSSSSIIIIIIIIFFFFFFFFFFFQQQQQQQQQVVVVVVVLLLLLLLLYYYYYYYYYYYYGGGGQQQQQQQQQYYYYYYYYYYYYRRRRRRRRRRRQQQQQQQQQFFFFFFFFFFFRRRRRRRRRRRKKKKKKKKKRRRRRRRRRRRDDDDDDDDAAAAAFFFFFFFFFFFLLLLLLLLGGGGTTTTTTTYYYYYYYYYYYYRRRRRRRRRRREEEEEEEEETTTTTTTKKKKKKKKKIIIIIIIIFFFFFFFFFFFQQQQQQQQQDDDDDDDDNNNNNNNNLLLLLLLLDDDDDDDDEEEEEEEEEFFFFFFFFFFFDDDDDDDDSSSSSSSSSSSSEEEEEEEEEEEEEEEEEEVVVVVVVVVVVVVVKKKKKKKKKDDDDDDDDLLLLLLLLIIIIIIIIDDDDDDDDEEEEEEEEEYYYYYYYYYYYYAAAAAAAAAAAAAAAEEEEEEEEEKKKKKKKKKMMMMMMMMDDDDDDDDYYYYYYYYYYYYIIIIIIIINNNNNNNNRRRRRRRRRRRGGGGKKKKKKKKKDDDDDDDDDDDDDDDDEEEEEEEEEDDDDDDDDMMMMMMMMDDDDDDDDYYYYYYYYYYYYDDDDDDDDPPPPPPPRRRRRRRRRRRAAAAAPPPPPPPPPPPPPPNNNNNNNNFFFFFFFFFFFRRRRRRRRRRRPPPPPPPIIIIIIIIEEEEEEEEEE

SEQ ID NO: 268 - protein, 3651 aa, Euplotes octocarinatus
MMMMMMMMPPPPPPPRRRRRRRRRRREEEEEEEEEIIIIIIIIIIIIIIIITTTTTTTCCCCCCQQQQQQQQQVVVVVVVGGGGQQQQQQQQQCCCCCCGGGGNNNNNNNNQQQQQQQQQIIIIIIIIGGGGMMMMMMMMEEEEEEEEEFFFFFFFFFFFWWWWWWWWWWWWWWKKKKKKKKKQQQQQQQQQLLLLLLLLCCCCCCMMMMMMMMEEEEEEEEEHHHHHHHHHHGGGGIIIIIIIINNNNNNNNPPPPPPPEEEEEEEEEGGGGIIIIIIIILLLLLLLLEEEEEEEEEDDDDDDDDFFFFFFFFFFFAAAAAVVVVVVVNNNNNNNNGGGGEEEEEEEEEDDDDDDDDRRRRRRRRRRRKKKKKKKKKDDDDDDDDVVVVVVVFFFFFFFFFFFFFFFFFFFFFFYYYYYYYYYYYYQQQQQQQQQAAAAADDDDDDDDDDDDDDDDEEEEEEEEEHHHHHHHHHHYYYYYYYYYYYYVVVVVVVPPPPPPPRRRRRRRRRRRAAAAAVVVVVVVLLLLLLLLIIIIIIIIDDDDDDDDLLLLLLLLEEEEEEEEEPPPPPPPRRRRRRRRRRRVVVVVVVIIIIIIIINNNNNNNNGGGGIIIIIIIIQQQQQQQQQKKKKKKKKKSSSSSSAAAAAYYYYYYYYYYYYSSSSSSSSSSSSLLLLLLLLYYYYYYYYYYYYNNNNNNNNPPPPPPPEEEEEEEEENNNNNNNNIIIIIIIIYYYYYYYYYYYYIIIIIIIIAAAAAKKKKKKKKKHHHHHHHHHHGGGGGGGGGGGGAAAAAGGGGNNNNNNNNNNNNNNNNWWWWWWWWWWWWWWGGGGRRRRRRRRRRRGGGGYYYYYYYYYYYYTTTTTTTDDDDDDDDAAAAAEEEEEEEEEKKKKKKKKKVVVVVVVQQQQQQQQQDDDDDDDDEEEEEEEEEIIIIIIIILLLLLLLLEEEEEEEEEMMMMMMMMIIIIIIIIDDDDDDDDRRRRRRRRRRREEEEEEEEEAAAAADDDDDDDDGGGGSSSSSSDDDDDDDDSSSSSSLLLLLLLLEEEEEEEEEGGGGFFFFFFFFFFFVVVVVVVLLLLLLLLTTTTTTTHHHHHHHHHHSSSSSSIIIIIIIIAAAAAGGGGGGGGTTTTTTTGGGGSSSSSSGGGGFFFFFFFFFFFGGGGSSSSSSYYYYYYYYYYYYLLLLLLLLLLLLLLLLEEEEEEEEERRRRRRRRRRRLLLLLLLLNNNNNNNNDDDDDDDDHHHHHHHHHHYYYYYYYYYYYYPPPPPPPKKKKKKKKKKKKKKKKKKLLLLLLLLIIIIIIIIQQQQQQQQQTTTTTTTYYYYYYYYYYYYSSSSSSVVVVVVVFFFFFFFFFFFPPPPPPPIIIIIIIIEEEEEEEEENNNNNNNNDDDDDDDDVVVVVVVVVVVVVVVVVVVVVQQQQQQQQQPPPPPPPYYYYYYYYYYYYNNNNNNNNCCCCCCLLLLLLLLLLLLLLLLSSSSSSIIIIIIIIKKKKKKKKKRRRRRRRRRRRLLLLLLLLTTTTTTTLLLLLLLLNNNNNNNNAAAAADDDDDDDDCCCCCCVVVVVVVVVVVVVVVVVVVVVLLLLLLLLDDDDDDDDNNNNNNNNNNNNNNNNAAAAALLLLLLLLTTTTTTTSSSSSSIIIIIIIIAAAAAVVVVVVVDDDDDDDDRRRRRRRRRRRLLLLLLLLKKKKKKKKKIIIIIIIILLLLLLLLQQQQQQQQQPPPPPPPTTTTTTTFFFFFFFFFFFSSSSSSQQQQQQQQQIIIIIIIINNNNNNNNSSSSSSIIIIIIIIVVVVVVVSSSSSSTTTTTTTVVVVVVVMMMMMMMMAAAAAAAAAASSSSSSTTTTTTTTTTTTTTTTTTTTTLLLLLLLLRRRRRRRRRRRYYYYYYYYYYYYPPPPPPPGGGGYYYYYYYYYYYYMMMMMMMMNNNNNNNNNNNNNNNNDDDDDDDDMMMMMMMMVVVVVVVGGGGLLLLLLLLIIIIIIIIAAAAASSSSSSLLLLLLLLVVVVVVVPPPPPPPTTTTTTTPPPPPPPRRRRRRRRRRRCCCCCCHHHHHHHHHHFFFFFFFFFFFLLLLLLLLMMMMMMMMTTTTTTTGGGGYYYYYYYYYYYYTTTTTTTPPPPPPPLLLLLLLLSSSSSSLLLLLLLLDDDDDDDDQQQQQQQQQKKKKKKKKKFFFFFFFFFFFTTTTTTTSSSSSSVVVVVVVRRRRRRRRRRRKKKKKKKKKTTTTTTTTTTTTTTVVVVVVVLLLLLLLLDDDDDDDDVVVVVVVMMMMMMMMRRRRRRRRRRRRRRRRRRRRRRLLLLLLLLLLLLLLLLQQQQQQQQQTTTTTTTKKKKKKKKKNNNNNNNNIIIIIIIIMMMMMMMMVVVVVVVTTTTTTTGGGGAAAAAVVVVVVVKKKKKKKKKKKKKKKKKKGGGGAAAAAYYYYYYYYYYYYMMMMMMMMSSSSSSIIIIIIIILLLLLLLLNNNNNNNNVVVVVVVIIIIIIIIQQQQQQQQQGGGGDDDDDDDDVVVVVVVDDDDDDDDPPPPPPPTTTTTTTQQQQQQQQQVVVVVVVHHHHHHHHHHKKKKKKKKKSSSSSSLLLLLLLLQQQQQQQQQRRRRRRRRRRRIIIIIIIIRRRRRRRRRRREEEEEEEEERRRRRRRRRRRKKKKKKKKKLLLLLLLLAAAAANNNNNNNNFFFFFFFFFFFIIIIIIIIPPPPPPPWWWWWWWWWWWWWWGGGGPPPPPPPAAAAASSSSSSIIIIIIIIQQQQQQQQQVVVVVVVAAAAALLLLLLLLSSSSSSKKKKKKKKKKKKKKKKKKSSSSSSPPPPPPPYYYYYYYYYYYYIIIIIIIIDDDDDDDDSSSSSSGGGGHHHHHHHHHHKKKKKKKKKVVVVVVVSSSSSSGGGGLLLLLLLLMMMMMMMMLLLLLLLLAAAAANNNNNNNNHHHHHHHHHHTTTTTTTGGGGIIIIIIIIRRRRRRRRRRRSSSSSSIIIIIIIIFFFFFFFFFFFKKKKKKKKKVVVVVVVLLLLLLLLYYYYYYYYYYYYDDDDDDDDQQQQQQQQQYYYYYYYYYYYYRRRRRRRRRRRTTTTTTTFFFFFFFFFFFRRRRRRRRRRRKKKKKKKKKRRRRRRRRRRRDDDDDDDDAAAAAYYYYYYYYYYYYMMMMMMMMNNNNNNNNIIIIIIIIFFFFFFFFFFFKKKKKKKKKQQQQQQQQQTTTTTTTKKKKKKKKKIIIIIIIIFFFFFFFFFFFEEEEEEEEEDDDDDDDDNNNNNNNNLLLLLLLLDDDDDDDDEEEEEEEEEFFFFFFFFFFFDDDDDDDDSSSSSSSSSSSSDDDDDDDDEEEEEEEEEVVVVVVVVVVVVVVKKKKKKKKKSSSSSSLLLLLLLLIIIIIIIIDDDDDDDDEEEEEEEEEYYYYYYYYYYYYAAAAAAAAAAAAAAAEEEEEEEEEKKKKKKKKKMMMMMMMMDDDDDDDDYYYYYYYYYYYYIIIIIIIINNNNNNNNWWWWWWWWWWWWWWGGGGSSSSSSDDDDDDDDDDDDDDDDDDDDDDDDDDDDDDDDMMMMMMMMQQQQQQQQQFFFFFFFFFFFDDDDDDDDPPPPPPPRRRRRRRRRRREEEEEEEEEPPPPPPPPPPPPPPKKKKKKKKKFFFFFFFFFFFSSSSSSNNNNNNNNIIIIIIIIQQQQQQQQQQ

SEQ ID NO: 269 - protein, 3595 aa, Homo sapiens
MMMMMMMMPPPPPPPRRRRRRRRRRREEEEEEEEEIIIIIIIIIIIIIIIITTTTTTTLLLLLLLLQQQQQQQQQLLLLLLLLGGGGQQQQQQQQQCCCCCCGGGGNNNNNNNNQQQQQQQQQIIIIIIIIGGGGFFFFFFFFFFFEEEEEEEEEFFFFFFFFFFFWWWWWWWWWWWWWWKKKKKKKKKQQQQQQQQQLLLLLLLLCCCCCCAAAAAEEEEEEEEEHHHHHHHHHHGGGGIIIIIIIISSSSSSPPPPPPPEEEEEEEEEGGGGIIIIIIIIVVVVVVVEEEEEEEEEEEEEEEEEEFFFFFFFFFFFAAAAATTTTTTTEEEEEEEEEGGGGTTTTTTTDDDDDDDDRRRRRRRRRRRKKKKKKKKKDDDDDDDDVVVVVVVFFFFFFFFFFFFFFFFFFFFFFYYYYYYYYYYYYQQQQQQQQQAAAAADDDDDDDDDDDDDDDDEEEEEEEEEHHHHHHHHHHYYYYYYYYYYYYIIIIIIIIPPPPPPPRRRRRRRRRRRAAAAAVVVVVVVLLLLLLLLLLLLLLLLDDDDDDDDLLLLLLLLEEEEEEEEEPPPPPPPRRRRRRRRRRRVVVVVVVIIIIIIIIHHHHHHHHHHSSSSSSIIIIIIIILLLLLLLLNNNNNNNNSSSSSSPPPPPPPYYYYYYYYYYYYAAAAAKKKKKKKKKLLLLLLLLYYYYYYYYYYYYNNNNNNNNPPPPPPPEEEEEEEEENNNNNNNNIIIIIIIIYYYYYYYYYYYYLLLLLLLLSSSSSSEEEEEEEEEHHHHHHHHHHGGGGGGGGGGGGAAAAAGGGGNNNNNNNNNNNNNNNNWWWWWWWWWWWWWWAAAAASSSSSSGGGGFFFFFFFFFFFSSSSSSQQQQQQQQQGGGGEEEEEEEEEKKKKKKKKKIIIIIIIIHHHHHHHHHHEEEEEEEEEDDDDDDDDIIIIIIIIFFFFFFFFFFFDDDDDDDDIIIIIIIIIIIIIIIIDDDDDDDDRRRRRRRRRRREEEEEEEEEAAAAADDDDDDDDGGGGSSSSSSDDDDDDDDSSSSSSLLLLLLLLEEEEEEEEEGGGGFFFFFFFFFFFVVVVVVVLLLLLLLLCCCCCCHHHHHHHHHHSSSSSSIIIIIIIIAAAAAGGGGGGGGTTTTTTTGGGGSSSSSSGGGGLLLLLLLLGGGGSSSSSSYYYYYYYYYYYYLLLLLLLLLLLLLLLLEEEEEEEEERRRRRRRRRRRLLLLLLLLNNNNNNNNDDDDDDDDRRRRRRRRRRRYYYYYYYYYYYYPPPPPPPKKKKKKKKKKKKKKKKKKLLLLLLLLVVVVVVVQQQQQQQQQTTTTTTTYYYYYYYYYYYYSSSSSSVVVVVVVFFFFFFFFFFFPPPPPPPYYYYYYYYYYYYQQQQQQQQQDDDDDDDDEEEEEEEEEMMMMMMMMSSSSSSDDDDDDDDVVVVVVVVVVVVVVVVVVVVVQQQQQQQQQPPPPPPPYYYYYYYYYYYYNNNNNNNNSSSSSSLLLLLLLLLLLLLLLLTTTTTTTLLLLLLLLKKKKKKKKKRRRRRRRRRRRLLLLLLLLTTTTTTTQQQQQQQQQNNNNNNNNAAAAADDDDDDDDCCCCCCVVVVVVVVVVVVVVVVVVVVVLLLLLLLLDDDDDDDDNNNNNNNNTTTTTTTAAAAALLLLLLLLNNNNNNNNRRRRRRRRRRRIIIIIIIIAAAAATTTTTTTDDDDDDDDRRRRRRRRRRRLLLLLLLLHHHHHHHHHHIIIIIIIIQQQQQQQQQNNNNNNNNPPPPPPPSSSSSSFFFFFFFFFFFSSSSSSQQQQQQQQQIIIIIIIINNNNNNNNQQQQQQQQQLLLLLLLLVVVVVVVSSSSSSTTTTTTTIIIIIIIIMMMMMMMMSSSSSSAAAAASSSSSSTTTTTTTTTTTTTTTTTTTTTLLLLLLLLRRRRRRRRRRRYYYYYYYYYYYYPPPPPPPGGGGYYYYYYYYYYYYMMMMMMMMNNNNNNNNNNNNNNNNDDDDDDDDLLLLLLLLIIIIIIIIGGGGLLLLLLLLIIIIIIIIAAAAASSSSSSLLLLLLLLIIIIIIIIPPPPPPPTTTTTTTPPPPPPPRRRRRRRRRRRLLLLLLLLHHHHHHHHHHFFFFFFFFFFFLLLLLLLLMMMMMMMMTTTTTTTGGGGYYYYYYYYYYYYTTTTTTTPPPPPPPLLLLLLLLTTTTTTTTTTTTTTDDDDDDDDQQQQQQQQQSSSSSSVVVVVVVAAAAASSSSSSVVVVVVVRRRRRRRRRRRKKKKKKKKKTTTTTTTTTTTTTTVVVVVVVLLLLLLLLDDDDDDDDVVVVVVVMMMMMMMMRRRRRRRRRRRRRRRRRRRRRRLLLLLLLLLLLLLLLLQQQQQQQQQPPPPPPPKKKKKKKKKNNNNNNNNVVVVVVVMMMMMMMMVVVVVVVSSSSSSTTTTTTTGGGGRRRRRRRRRRRDDDDDDDDRRRRRRRRRRRQQQQQQQQQTTTTTTTNNNNNNNNHHHHHHHHHHCCCCCCYYYYYYYYYYYYIIIIIIIIAAAAAIIIIIIIILLLLLLLLNNNNNNNNIIIIIIIIIIIIIIIIQQQQQQQQQGGGGEEEEEEEEEVVVVVVVDDDDDDDDPPPPPPPTTTTTTTQQQQQQQQQVVVVVVVHHHHHHHHHHKKKKKKKKKSSSSSSLLLLLLLLQQQQQQQQQRRRRRRRRRRRIIIIIIIIRRRRRRRRRRREEEEEEEEERRRRRRRRRRRKKKKKKKKKLLLLLLLLAAAAANNNNNNNNFFFFFFFFFFFIIIIIIIIPPPPPPPWWWWWWWWWWWWWWGGGGPPPPPPPAAAAASSSSSSIIIIIIIIQQQQQQQQQVVVVVVVAAAAALLLLLLLLSSSSSSRRRRRRRRRRRKKKKKKKKKSSSSSSPPPPPPPYYYYYYYYYYYYLLLLLLLLPPPPPPPSSSSSSAAAAAHHHHHHHHHHRRRRRRRRRRRVVVVVVVSSSSSSGGGGLLLLLLLLMMMMMMMMMMMMMMMMAAAAANNNNNNNNHHHHHHHHHHTTTTTTTSSSSSSIIIIIIIISSSSSSSSSSSSLLLLLLLLFFFFFFFFFFFEEEEEEEEESSSSSSSSSSSSCCCCCCQQQQQQQQQQQQQQQQQQFFFFFFFFFFFDDDDDDDDKKKKKKKKKLLLLLLLLRRRRRRRRRRRKKKKKKKKKRRRRRRRRRRRDDDDDDDDAAAAAFFFFFFFFFFFLLLLLLLLEEEEEEEEEQQQQQQQQQFFFFFFFFFFFRRRRRRRRRRRKKKKKKKKKEEEEEEEEEDDDDDDDDMMMMMMMMFFFFFFFFFFFKKKKKKKKKDDDDDDDDNNNNNNNNFFFFFFFFFFFDDDDDDDDEEEEEEEEEMMMMMMMMDDDDDDDDRRRRRRRRRRRSSSSSSRRRRRRRRRRREEEEEEEEEVVVVVVVVVVVVVVQQQQQQQQQEEEEEEEEELLLLLLLLIIIIIIIIDDDDDDDDEEEEEEEEEYYYYYYYYYYYYHHHHHHHHHHAAAAAAAAAATTTTTTTQQQQQQQQQPPPPPPPDDDDDDDDYYYYYYYYYYYYIIIIIIIISSSSSSWWWWWWWWWWWWWWGGGGTTTTTTTQQQQQQQQQEEEEEEEEEQQQQQQQQQQ

SEQ ID NO: 270 - protein, 3710 aa, Zea mays
MMMMMMMMPPPPPPPRRRRRRRRRRREEEEEEEEEIIIIIIIIIIIIIIIITTTTTTTIIIIIIIIQQQQQQQQQVVVVVVVGGGGQQQQQQQQQCCCCCCGGGGNNNNNNNNQQQQQQQQQIIIIIIIIGGGGMMMMMMMMEEEEEEEEEFFFFFFFFFFFWWWWWWWWWWWWWWKKKKKKKKKQQQQQQQQQLLLLLLLLCCCCCCLLLLLLLLEEEEEEEEEHHHHHHHHHHGGGGIIIIIIIIGGGGKKKKKKKKKDDDDDDDDGGGGLLLLLLLLLLLLLLLLEEEEEEEEEDDDDDDDDFFFFFFFFFFFAAAAATTTTTTTQQQQQQQQQGGGGGGGGDDDDDDDDRRRRRRRRRRRKKKKKKKKKDDDDDDDDVVVVVVVFFFFFFFFFFFFFFFFFFFFFFYYYYYYYYYYYYQQQQQQQQQAAAAADDDDDDDDDDDDDDDDQQQQQQQQQHHHHHHHHHHFFFFFFFFFFFIIIIIIIIPPPPPPPRRRRRRRRRRRSSSSSSLLLLLLLLLLLLLLLLIIIIIIIIDDDDDDDDLLLLLLLLEEEEEEEEEPPPPPPPRRRRRRRRRRRVVVVVVVIIIIIIIINNNNNNNNGGGGIIIIIIIIQQQQQQQQQNNNNNNNNSSSSSSEEEEEEEEEYYYYYYYYYYYYRRRRRRRRRRRNNNNNNNNLLLLLLLLYYYYYYYYYYYYNNNNNNNNHHHHHHHHHHEEEEEEEEENNNNNNNNIIIIIIIIFFFFFFFFFFFVVVVVVVAAAAAEEEEEEEEEHHHHHHHHHHGGGGGGGGGGGGAAAAAGGGGNNNNNNNNNNNNNNNNWWWWWWWWWWWWWWAAAAASSSSSSGGGGYYYYYYYYYYYYHHHHHHHHHHQQQQQQQQQGGGGEEEEEEEEEQQQQQQQQQVVVVVVVVVVVVVVDDDDDDDDDDDDDDDDIIIIIIIIMMMMMMMMDDDDDDDDMMMMMMMMVVVVVVVDDDDDDDDRRRRRRRRRRREEEEEEEEEAAAAADDDDDDDDGGGGSSSSSSDDDDDDDDSSSSSSLLLLLLLLEEEEEEEEEGGGGFFFFFFFFFFFVVVVVVVLLLLLLLLCCCCCCHHHHHHHHHHSSSSSSIIIIIIIIAAAAAGGGGGGGGTTTTTTTGGGGSSSSSSGGGGMMMMMMMMGGGGSSSSSSYYYYYYYYYYYYLLLLLLLLLLLLLLLLEEEEEEEEETTTTTTTLLLLLLLLNNNNNNNNDDDDDDDDRRRRRRRRRRRYYYYYYYYYYYYSSSSSSKKKKKKKKKKKKKKKKKKLLLLLLLLVVVVVVVQQQQQQQQQTTTTTTTYYYYYYYYYYYYSSSSSSVVVVVVVFFFFFFFFFFFPPPPPPPNNNNNNNNQQQQQQQQQMMMMMMMMEEEEEEEEETTTTTTTSSSSSSDDDDDDDDVVVVVVVVVVVVVVVVVVVVVQQQQQQQQQPPPPPPPYYYYYYYYYYYYNNNNNNNNSSSSSSLLLLLLLLLLLLLLLLTTTTTTTLLLLLLLLKKKKKKKKKRRRRRRRRRRRLLLLLLLLTTTTTTTLLLLLLLLNNNNNNNNAAAAADDDDDDDDCCCCCCVVVVVVVVVVVVVVVVVVVVVLLLLLLLLDDDDDDDDNNNNNNNNTTTTTTTAAAAALLLLLLLLNNNNNNNNRRRRRRRRRRRIIIIIIIIAAAAAVVVVVVVEEEEEEEEERRRRRRRRRRRLLLLLLLLHHHHHHHHHHLLLLLLLLSSSSSSNNNNNNNNPPPPPPPTTTTTTTFFFFFFFFFFFAAAAAQQQQQQQQQTTTTTTTNNNNNNNNSSSSSSLLLLLLLLVVVVVVVSSSSSSTTTTTTTVVVVVVVMMMMMMMMSSSSSSAAAAASSSSSSTTTTTTTTTTTTTTTTTTTTTLLLLLLLLRRRRRRRRRRRYYYYYYYYYYYYPPPPPPPGGGGYYYYYYYYYYYYMMMMMMMMNNNNNNNNNNNNNNNNDDDDDDDDLLLLLLLLVVVVVVVGGGGLLLLLLLLLLLLLLLLAAAAASSSSSSLLLLLLLLIIIIIIIIPPPPPPPTTTTTTTPPPPPPPRRRRRRRRRRRCCCCCCHHHHHHHHHHFFFFFFFFFFFLLLLLLLLMMMMMMMMTTTTTTTGGGGYYYYYYYYYYYYTTTTTTTPPPPPPPLLLLLLLLTTTTTTTVVVVVVVEEEEEEEEERRRRRRRRRRRQQQQQQQQQVVVVVVVNNNNNNNNMMMMMMMMIIIIIIIIRRRRRRRRRRRKKKKKKKKKTTTTTTTTTTTTTTVVVVVVVLLLLLLLLDDDDDDDDVVVVVVVMMMMMMMMRRRRRRRRRRRRRRRRRRRRRRLLLLLLLLLLLLLLLLQQQQQQQQQTTTTTTTKKKKKKKKKNNNNNNNNVVVVVVVMMMMMMMMVVVVVVVSSSSSSSSSSSSYYYYYYYYYYYYAAAAARRRRRRRRRRRTTTTTTTKKKKKKKKKEEEEEEEEEAAAAASSSSSSQQQQQQQQQAAAAAKKKKKKKKKYYYYYYYYYYYYIIIIIIIISSSSSSIIIIIIIILLLLLLLLNNNNNNNNIIIIIIIIIIIIIIIIQQQQQQQQQGGGGEEEEEEEEEVVVVVVVDDDDDDDDPPPPPPPTTTTTTTQQQQQQQQQVVVVVVVHHHHHHHHHHEEEEEEEEESSSSSSLLLLLLLLQQQQQQQQQRRRRRRRRRRRIIIIIIIIRRRRRRRRRRREEEEEEEEERRRRRRRRRRRKKKKKKKKKLLLLLLLLVVVVVVVNNNNNNNNFFFFFFFFFFFIIIIIIIIDDDDDDDDWWWWWWWWWWWWWWAAAAAPPPPPPPAAAAASSSSSSIIIIIIIIQQQQQQQQQVVVVVVVAAAAALLLLLLLLSSSSSSRRRRRRRRRRRKKKKKKKKKSSSSSSPPPPPPPYYYYYYYYYYYYVVVVVVVQQQQQQQQQTTTTTTTTTTTTTTHHHHHHHHHHRRRRRRRRRRRVVVVVVVSSSSSSGGGGLLLLLLLLMMMMMMMMLLLLLLLLAAAAANNNNNNNNHHHHHHHHHHTTTTTTTSSSSSSIIIIIIIIRRRRRRRRRRRHHHHHHHHHHLLLLLLLLFFFFFFFFFFFGGGGKKKKKKKKKCCCCCCLLLLLLLLGGGGQQQQQQQQQYYYYYYYYYYYYEEEEEEEEEKKKKKKKKKLLLLLLLLRRRRRRRRRRRKKKKKKKKKKKKKKKKKKQQQQQQQQQAAAAAFFFFFFFFFFFLLLLLLLLDDDDDDDDNNNNNNNNYYYYYYYYYYYYRRRRRRRRRRRKKKKKKKKKFFFFFFFFFFFPPPPPPPMMMMMMMMFFFFFFFFFFFAAAAADDDDDDDDNNNNNNNNDDDDDDDDLLLLLLLLSSSSSSEEEEEEEEEFFFFFFFFFFFDDDDDDDDEEEEEEEEESSSSSSRRRRRRRRRRREEEEEEEEEIIIIIIIIIIIIIIIIEEEEEEEEESSSSSSLLLLLLLLVVVVVVVDDDDDDDDEEEEEEEEEYYYYYYYYYYYYKKKKKKKKKAAAAACCCCCCEEEEEEEEESSSSSSPPPPPPPDDDDDDDDYYYYYYYYYYYYIIIIIIIIKKKKKKKKKWWWWWWWWWWWWWWGGGGMMMMMMMMEEEEEEEEEDDDDDDDDPPPPPPPGGGGEEEEEEEEEAAAAANNNNNNNNVVVVVVVAAAAAAAAAADDDDDDDDLLLLLLLLDDDDDDDDSSSSSSKKKKKKKKKLLLLLLLLVVVVVVVVVVVVVVV

SEQ ID NO: 271 - protein, 3599 aa, Mus musculus
MMMMMMMMPPPPPPPRRRRRRRRRRREEEEEEEEEIIIIIIIIIIIIIIIITTTTTTTLLLLLLLLQQQQQQQQQLLLLLLLLGGGGQQQQQQQQQCCCCCCGGGGNNNNNNNNQQQQQQQQQIIIIIIIIGGGGFFFFFFFFFFFEEEEEEEEEFFFFFFFFFFFWWWWWWWWWWWWWWKKKKKKKKKQQQQQQQQQLLLLLLLLCCCCCCAAAAAEEEEEEEEEHHHHHHHHHHGGGGIIIIIIIISSSSSSPPPPPPPEEEEEEEEEGGGGIIIIIIIIVVVVVVVEEEEEEEEEEEEEEEEEEFFFFFFFFFFFAAAAATTTTTTTEEEEEEEEEGGGGTTTTTTTDDDDDDDDRRRRRRRRRRRKKKKKKKKKDDDDDDDDVVVVVVVFFFFFFFFFFFFFFFFFFFFFFYYYYYYYYYYYYQQQQQQQQQAAAAADDDDDDDDDDDDDDDDEEEEEEEEEHHHHHHHHHHYYYYYYYYYYYYIIIIIIIIPPPPPPPRRRRRRRRRRRAAAAAVVVVVVVLLLLLLLLLLLLLLLLDDDDDDDDLLLLLLLLEEEEEEEEEPPPPPPPRRRRRRRRRRRVVVVVVVIIIIIIIIHHHHHHHHHHSSSSSSIIIIIIIILLLLLLLLNNNNNNNNSSSSSSSSSSSSYYYYYYYYYYYYAAAAAKKKKKKKKKLLLLLLLLYYYYYYYYYYYYNNNNNNNNPPPPPPPEEEEEEEEENNNNNNNNIIIIIIIIYYYYYYYYYYYYLLLLLLLLSSSSSSEEEEEEEEEHHHHHHHHHHGGGGGGGGGGGGAAAAAGGGGNNNNNNNNNNNNNNNNWWWWWWWWWWWWWWGGGGRRRRRRRRRRRGGGGFFFFFFFFFFFSSSSSSQQQQQQQQQGGGGEEEEEEEEEKKKKKKKKKIIIIIIIIHHHHHHHHHHEEEEEEEEEDDDDDDDDIIIIIIIIFFFFFFFFFFFDDDDDDDDIIIIIIIIIIIIIIIIDDDDDDDDRRRRRRRRRRREEEEEEEEEAAAAADDDDDDDDGGGGSSSSSSDDDDDDDDSSSSSSLLLLLLLLEEEEEEEEEGGGGFFFFFFFFFFFVVVVVVVLLLLLLLLCCCCCCHHHHHHHHHHSSSSSSIIIIIIIIAAAAAGGGGGGGGTTTTTTTGGGGSSSSSSGGGGLLLLLLLLGGGGSSSSSSYYYYYYYYYYYYLLLLLLLLLLLLLLLLEEEEEEEEERRRRRRRRRRRLLLLLLLLNNNNNNNNDDDDDDDDRRRRRRRRRRRYYYYYYYYYYYYPPPPPPPKKKKKKKKKKKKKKKKKKLLLLLLLLVVVVVVVQQQQQQQQQTTTTTTTYYYYYYYYYYYYSSSSSSVVVVVVVFFFFFFFFFFFPPPPPPPNNNNNNNNQQQQQQQQQDDDDDDDDEEEEEEEEEMMMMMMMMSSSSSSDDDDDDDDVVVVVVVVVVVVVVVVVVVVVQQQQQQQQQPPPPPPPYYYYYYYYYYYYNNNNNNNNSSSSSSLLLLLLLLLLLLLLLLTTTTTTTLLLLLLLLKKKKKKKKKRRRRRRRRRRRLLLLLLLLTTTTTTTQQQQQQQQQNNNNNNNNAAAAADDDDDDDDCCCCCCVVVVVVVVVVVVVVVVVVVVVLLLLLLLLDDDDDDDDNNNNNNNNTTTTTTTAAAAALLLLLLLLNNNNNNNNRRRRRRRRRRRIIIIIIIIAAAAATTTTTTTDDDDDDDDRRRRRRRRRRRLLLLLLLLHHHHHHHHHHIIIIIIIIQQQQQQQQQNNNNNNNNPPPPPPPSSSSSSFFFFFFFFFFFSSSSSSQQQQQQQQQIIIIIIIINNNNNNNNQQQQQQQQQLLLLLLLLVVVVVVVSSSSSSTTTTTTTIIIIIIIIMMMMMMMMSSSSSSAAAAASSSSSSTTTTTTTTTTTTTTTTTTTTTLLLLLLLLRRRRRRRRRRRYYYYYYYYYYYYPPPPPPPGGGGYYYYYYYYYYYYMMMMMMMMNNNNNNNNNNNNNNNNDDDDDDDDLLLLLLLLIIIIIIIIGGGGLLLLLLLLIIIIIIIIAAAAASSSSSSLLLLLLLLIIIIIIIIPPPPPPPTTTTTTTPPPPPPPRRRRRRRRRRRLLLLLLLLHHHHHHHHHHFFFFFFFFFFFLLLLLLLLMMMMMMMMTTTTTTTGGGGYYYYYYYYYYYYTTTTTTTPPPPPPPLLLLLLLLTTTTTTTTTTTTTTDDDDDDDDQQQQQQQQQSSSSSSVVVVVVVAAAAASSSSSSVVVVVVVRRRRRRRRRRRKKKKKKKKKTTTTTTTTTTTTTTVVVVVVVLLLLLLLLDDDDDDDDVVVVVVVMMMMMMMMRRRRRRRRRRRRRRRRRRRRRRLLLLLLLLLLLLLLLLQQQQQQQQQPPPPPPPKKKKKKKKKNNNNNNNNVVVVVVVMMMMMMMMVVVVVVVSSSSSSTTTTTTTGGGGRRRRRRRRRRRDDDDDDDDRRRRRRRRRRRQQQQQQQQQTTTTTTTNNNNNNNNHHHHHHHHHHCCCCCCYYYYYYYYYYYYIIIIIIIIAAAAAIIIIIIIILLLLLLLLNNNNNNNNIIIIIIIIIIIIIIIIQQQQQQQQQGGGGEEEEEEEEEVVVVVVVDDDDDDDDPPPPPPPTTTTTTTQQQQQQQQQVVVVVVVHHHHHHHHHHKKKKKKKKKSSSSSSLLLLLLLLQQQQQQQQQRRRRRRRRRRRIIIIIIIIRRRRRRRRRRREEEEEEEEERRRRRRRRRRRKKKKKKKKKLLLLLLLLAAAAANNNNNNNNFFFFFFFFFFFIIIIIIIIPPPPPPPWWWWWWWWWWWWWWGGGGPPPPPPPAAAAASSSSSSIIIIIIIIQQQQQQQQQVVVVVVVAAAAALLLLLLLLSSSSSSRRRRRRRRRRRKKKKKKKKKSSSSSSPPPPPPPYYYYYYYYYYYYLLLLLLLLPPPPPPPSSSSSSAAAAAHHHHHHHHHHRRRRRRRRRRRVVVVVVVSSSSSSGGGGLLLLLLLLMMMMMMMMMMMMMMMMAAAAANNNNNNNNHHHHHHHHHHTTTTTTTSSSSSSIIIIIIIISSSSSSSSSSSSLLLLLLLLFFFFFFFFFFFEEEEEEEEESSSSSSSSSSSSCCCCCCQQQQQQQQQQQQQQQQQQYYYYYYYYYYYYDDDDDDDDKKKKKKKKKLLLLLLLLWWWWWWWWWWWWWWKKKKKKKKKRRRRRRRRRRRGGGGAAAAAFFFFFFFFFFFLLLLLLLLEEEEEEEEEQQQQQQQQQFFFFFFFFFFFRRRRRRRRRRRKKKKKKKKKEEEEEEEEEDDDDDDDDIIIIIIIIFFFFFFFFFFFKKKKKKKKKDDDDDDDDNNNNNNNNFFFFFFFFFFFEEEEEEEEEEEEEEEEEEMMMMMMMMHHHHHHHHHHRRRRRRRRRRRSSSSSSRRRRRRRRRRREEEEEEEEEVVVVVVVVVVVVVVQQQQQQQQQEEEEEEEEELLLLLLLLIIIIIIIIDDDDDDDDEEEEEEEEEYYYYYYYYYYYYHHHHHHHHHHAAAAAAAAAATTTTTTTRRRRRRRRRRRPPPPPPPDDDDDDDDYYYYYYYYYYYYIIIIIIIISSSSSSWWWWWWWWWWWWWWGGGGTTTTTTTQQQQQQQQQEEEEEEEEEQQQQQQQQQQ

SEQ ID NO: 272 - protein, 3712 aa, Oryza sativa
MMMMMMMMPPPPPPPRRRRRRRRRRREEEEEEEEEIIIIIIIIIIIIIIIITTTTTTTIIIIIIIIQQQQQQQQQVVVVVVVGGGGQQQQQQQQQCCCCCCGGGGNNNNNNNNQQQQQQQQQIIIIIIIIGGGGMMMMMMMMEEEEEEEEEFFFFFFFFFFFWWWWWWWWWWWWWWKKKKKKKKKQQQQQQQQQLLLLLLLLCCCCCCLLLLLLLLEEEEEEEEEHHHHHHHHHHGGGGIIIIIIIIGGGGKKKKKKKKKDDDDDDDDGGGGLLLLLLLLLLLLLLLLEEEEEEEEEDDDDDDDDFFFFFFFFFFFAAAAATTTTTTTQQQQQQQQQGGGGGGGGDDDDDDDDRRRRRRRRRRRKKKKKKKKKDDDDDDDDVVVVVVVFFFFFFFFFFFFFFFFFFFFFFYYYYYYYYYYYYQQQQQQQQQAAAAADDDDDDDDDDDDDDDDQQQQQQQQQHHHHHHHHHHYYYYYYYYYYYYIIIIIIIIPPPPPPPRRRRRRRRRRRAAAAALLLLLLLLLLLLLLLLVVVVVVVDDDDDDDDLLLLLLLLEEEEEEEEEPPPPPPPRRRRRRRRRRRVVVVVVVIIIIIIIINNNNNNNNGGGGIIIIIIIIQQQQQQQQQNNNNNNNNSSSSSSEEEEEEEEEYYYYYYYYYYYYRRRRRRRRRRRNNNNNNNNLLLLLLLLYYYYYYYYYYYYNNNNNNNNHHHHHHHHHHEEEEEEEEENNNNNNNNIIIIIIIIFFFFFFFFFFFVVVVVVVAAAAAEEEEEEEEEHHHHHHHHHHGGGGGGGGGGGGAAAAAGGGGNNNNNNNNNNNNNNNNWWWWWWWWWWWWWWAAAAASSSSSSGGGGYYYYYYYYYYYYHHHHHHHHHHQQQQQQQQQGGGGEEEEEEEEEQQQQQQQQQVVVVVVVVVVVVVVDDDDDDDDDDDDDDDDIIIIIIIIMMMMMMMMDDDDDDDDMMMMMMMMIIIIIIIIDDDDDDDDRRRRRRRRRRREEEEEEEEEAAAAADDDDDDDDGGGGSSSSSSDDDDDDDDSSSSSSLLLLLLLLEEEEEEEEEGGGGFFFFFFFFFFFVVVVVVVLLLLLLLLCCCCCCHHHHHHHHHHSSSSSSIIIIIIIIAAAAAGGGGGGGGTTTTTTTGGGGSSSSSSGGGGMMMMMMMMGGGGSSSSSSYYYYYYYYYYYYLLLLLLLLLLLLLLLLEEEEEEEEETTTTTTTLLLLLLLLNNNNNNNNDDDDDDDDRRRRRRRRRRRYYYYYYYYYYYYSSSSSSKKKKKKKKKKKKKKKKKKLLLLLLLLVVVVVVVQQQQQQQQQTTTTTTTYYYYYYYYYYYYSSSSSSVVVVVVVFFFFFFFFFFFPPPPPPPNNNNNNNNQQQQQQQQQMMMMMMMMEEEEEEEEETTTTTTTSSSSSSDDDDDDDDVVVVVVVVVVVVVVVVVVVVVQQQQQQQQQPPPPPPPYYYYYYYYYYYYNNNNNNNNSSSSSSLLLLLLLLLLLLLLLLTTTTTTTLLLLLLLLKKKKKKKKKRRRRRRRRRRRLLLLLLLLTTTTTTTLLLLLLLLNNNNNNNNAAAAADDDDDDDDCCCCCCVVVVVVVVVVVVVVVVVVVVVLLLLLLLLDDDDDDDDNNNNNNNNTTTTTTTAAAAALLLLLLLLNNNNNNNNRRRRRRRRRRRIIIIIIIIAAAAAVVVVVVVEEEEEEEEERRRRRRRRRRRLLLLLLLLHHHHHHHHHHLLLLLLLLAAAAANNNNNNNNPPPPPPPTTTTTTTFFFFFFFFFFFAAAAAQQQQQQQQQTTTTTTTNNNNNNNNSSSSSSLLLLLLLLVVVVVVVSSSSSSTTTTTTTVVVVVVVMMMMMMMMSSSSSSAAAAASSSSSSTTTTTTTTTTTTTTTTTTTTTLLLLLLLLRRRRRRRRRRRYYYYYYYYYYYYPPPPPPPGGGGYYYYYYYYYYYYMMMMMMMMNNNNNNNNNNNNNNNNDDDDDDDDLLLLLLLLVVVVVVVGGGGLLLLLLLLLLLLLLLLAAAAASSSSSSLLLLLLLLIIIIIIIIPPPPPPPTTTTTTTPPPPPPPRRRRRRRRRRRCCCCCCHHHHHHHHHHFFFFFFFFFFFLLLLLLLLMMMMMMMMTTTTTTTGGGGYYYYYYYYYYYYTTTTTTTPPPPPPPLLLLLLLLTTTTTTTVVVVVVVEEEEEEEEERRRRRRRRRRRQQQQQQQQQVVVVVVVNNNNNNNNMMMMMMMMIIIIIIIIRRRRRRRRRRRKKKKKKKKKTTTTTTTTTTTTTTVVVVVVVLLLLLLLLDDDDDDDDVVVVVVVMMMMMMMMRRRRRRRRRRRRRRRRRRRRRRLLLLLLLLLLLLLLLLQQQQQQQQQTTTTTTTKKKKKKKKKNNNNNNNNIIIIIIIIMMMMMMMMVVVVVVVSSSSSSSSSSSSYYYYYYYYYYYYAAAAARRRRRRRRRRRNNNNNNNNKKKKKKKKKEEEEEEEEEAAAAASSSSSSQQQQQQQQQAAAAAKKKKKKKKKYYYYYYYYYYYYIIIIIIIISSSSSSIIIIIIIILLLLLLLLNNNNNNNNIIIIIIIIIIIIIIIIQQQQQQQQQGGGGEEEEEEEEEVVVVVVVDDDDDDDDPPPPPPPTTTTTTTQQQQQQQQQVVVVVVVHHHHHHHHHHEEEEEEEEESSSSSSLLLLLLLLQQQQQQQQQRRRRRRRRRRRIIIIIIIIRRRRRRRRRRREEEEEEEEERRRRRRRRRRRKKKKKKKKKLLLLLLLLVVVVVVVNNNNNNNNFFFFFFFFFFFIIIIIIIIEEEEEEEEEWWWWWWWWWWWWWWGGGGPPPPPPPAAAAASSSSSSIIIIIIIIQQQQQQQQQVVVVVVVAAAAALLLLLLLLSSSSSSRRRRRRRRRRRKKKKKKKKKSSSSSSPPPPPPPYYYYYYYYYYYYVVVVVVVQQQQQQQQQTTTTTTTTTTTTTTHHHHHHHHHHRRRRRRRRRRRVVVVVVVSSSSSSGGGGLLLLLLLLMMMMMMMMLLLLLLLLAAAAANNNNNNNNHHHHHHHHHHTTTTTTTSSSSSSIIIIIIIIRRRRRRRRRRRHHHHHHHHHHLLLLLLLLFFFFFFFFFFFSSSSSSKKKKKKKKKCCCCCCLLLLLLLLGGGGQQQQQQQQQYYYYYYYYYYYYEEEEEEEEEKKKKKKKKKLLLLLLLLRRRRRRRRRRRKKKKKKKKKKKKKKKKKKQQQQQQQQQAAAAAFFFFFFFFFFFLLLLLLLLDDDDDDDDNNNNNNNNYYYYYYYYYYYYRRRRRRRRRRRKKKKKKKKKFFFFFFFFFFFPPPPPPPMMMMMMMMFFFFFFFFFFFEEEEEEEEEDDDDDDDDNNNNNNNNDDDDDDDDLLLLLLLLSSSSSSEEEEEEEEEFFFFFFFFFFFDDDDDDDDEEEEEEEEESSSSSSRRRRRRRRRRREEEEEEEEEIIIIIIIIIIIIIIIIEEEEEEEEESSSSSSLLLLLLLLVVVVVVVDDDDDDDDEEEEEEEEEYYYYYYYYYYYYKKKKKKKKKAAAAACCCCCCEEEEEEEEESSSSSSPPPPPPPDDDDDDDDYYYYYYYYYYYYIIIIIIIIKKKKKKKKKWWWWWWWWWWWWWWGGGGMMMMMMMMEEEEEEEEEDDDDDDDDAAAAAGGGGEEEEEEEEEAAAAANNNNNNNNVVVVVVVAAAAAAAAAAAAAAALLLLLLLLDDDDDDDDSSSSSSKKKKKKKKKLLLLLLLLVVVVVVVVVVVVVVV

SEQ ID NO: 273 - protein, 3342 aa, Zea mays
DDDDDDDDVVVVVVVFFFFFFFFFFFFFFFFFFFFFFYYYYYYYYYYYYQQQQQQQQQAAAAADDDDDDDDDDDDDDDDQQQQQQQQQHHHHHHHHHHFFFFFFFFFFFIIIIIIIIPPPPPPPRRRRRRRRRRRSSSSSSLLLLLLLLLLLLLLLLIIIIIIIIDDDDDDDDLLLLLLLLEEEEEEEEEPPPPPPPRRRRRRRRRRRVVVVVVVIIIIIIIINNNNNNNNGGGGIIIIIIIIQQQQQQQQQNNNNNNNNSSSSSSEEEEEEEEEYYYYYYYYYYYYRRRRRRRRRRRNNNNNNNNLLLLLLLLYYYYYYYYYYYYNNNNNNNNHHHHHHHHHHEEEEEEEEENNNNNNNNIIIIIIIIFFFFFFFFFFFVVVVVVVAAAAAEEEEEEEEEHHHHHHHHHHGGGGGGGGGGGGAAAAAGGGGNNNNNNNNNNNNNNNNWWWWWWWWWWWWWWAAAAASSSSSSGGGGYYYYYYYYYYYYHHHHHHHHHHQQQQQQQQQGGGGEEEEEEEEEQQQQQQQQQFFFFFFFFFFFVVVVVVVDDDDDDDDDDDDDDDDIIIIIIIIMMMMMMMMDDDDDDDDMMMMMMMMVVVVVVVDDDDDDDDRRRRRRRRRRREEEEEEEEEAAAAADDDDDDDDGGGGSSSSSSDDDDDDDDSSSSSSLLLLLLLLEEEEEEEEEGGGGFFFFFFFFFFFVVVVVVVLLLLLLLLCCCCCCHHHHHHHHHHSSSSSSIIIIIIIIAAAAAGGGGGGGGTTTTTTTGGGGSSSSSSGGGGMMMMMMMMGGGGSSSSSSYYYYYYYYYYYYLLLLLLLLLLLLLLLLEEEEEEEEETTTTTTTLLLLLLLLNNNNNNNNDDDDDDDDRRRRRRRRRRRYYYYYYYYYYYYSSSSSSKKKKKKKKKKKKKKKKKKLLLLLLLLVVVVVVVQQQQQQQQQTTTTTTTYYYYYYYYYYYYSSSSSSVVVVVVVFFFFFFFFFFFPPPPPPPNNNNNNNNQQQQQQQQQVVVVVVVEEEEEEEEETTTTTTTSSSSSSDDDDDDDDVVVVVVVVVVVVVVVVVVVVVQQQQQQQQQPPPPPPPYYYYYYYYYYYYNNNNNNNNSSSSSSLLLLLLLLLLLLLLLLTTTTTTTLLLLLLLLKKKKKKKKKRRRRRRRRRRRLLLLLLLLTTTTTTTLLLLLLLLNNNNNNNNAAAAADDDDDDDDCCCCCCVVVVVVVVVVVVVVVVVVVVVLLLLLLLLDDDDDDDDNNNNNNNNTTTTTTTAAAAALLLLLLLLNNNNNNNNRRRRRRRRRRRIIIIIIIIAAAAAVVVVVVVEEEEEEEEERRRRRRRRRRRLLLLLLLLHHHHHHHHHHLLLLLLLLSSSSSSNNNNNNNNPPPPPPPTTTTTTTFFFFFFFFFFFAAAAAQQQQQQQQQTTTTTTTNNNNNNNNSSSSSSLLLLLLLLVVVVVVVSSSSSSTTTTTTTVVVVVVVMMMMMMMMSSSSSSAAAAASSSSSSTTTTTTTTTTTTTTTTTTTTTLLLLLLLLRRRRRRRRRRRYYYYYYYYYYYYPPPPPPPGGGGYYYYYYYYYYYYMMMMMMMMNNNNNNNNNNNNNNNNDDDDDDDDLLLLLLLLVVVVVVVGGGGLLLLLLLLLLLLLLLLAAAAASSSSSSLLLLLLLLIIIIIIIIPPPPPPPTTTTTTTPPPPPPPRRRRRRRRRRRCCCCCCHHHHHHHHHHFFFFFFFFFFFLLLLLLLLMMMMMMMMTTTTTTTGGGGYYYYYYYYYYYYTTTTTTTPPPPPPPLLLLLLLLTTTTTTTVVVVVVVEEEEEEEEERRRRRRRRRRRQQQQQQQQQVVVVVVVNNNNNNNNMMMMMMMMIIIIIIIIRRRRRRRRRRRKKKKKKKKKTTTTTTTTTTTTTTVVVVVVVLLLLLLLLDDDDDDDDVVVVVVVMMMMMMMMRRRRRRRRRRRRRRRRRRRRRRLLLLLLLLLLLLLLLLQQQQQQQQQTTTTTTTKKKKKKKKKNNNNNNNNIIIIIIIIMMMMMMMMVVVVVVVSSSSSSSSSSSSYYYYYYYYYYYYAAAAARRRRRRRRRRRTTTTTTTKKKKKKKKKEEEEEEEEEAAAAASSSSSSQQQQQQQQQAAAAAKKKKKKKKKYYYYYYYYYYYYIIIIIIIISSSSSSIIIIIIIILLLLLLLLNNNNNNNNIIIIIIIIIIIIIIIIQQQQQQQQQGGGGEEEEEEEEEVVVVVVVDDDDDDDDPPPPPPPTTTTTTTQQQQQQQQQVVVVVVVHHHHHHHHHHEEEEEEEEESSSSSSLLLLLLLLQQQQQQQQQRRRRRRRRRRRIIIIIIIIRRRRRRRRRRREEEEEEEEERRRRRRRRRRRKKKKKKKKKLLLLLLLLVVVVVVVNNNNNNNNFFFFFFFFFFFIIIIIIIIDDDDDDDDWWWWWWWWWWWWWWAAAAAPPPPPPPAAAAASSSSSSIIIIIIIIQQQQQQQQQVVVVVVVAAAAALLLLLLLLSSSSSSRRRRRRRRRRRKKKKKKKKKSSSSSSPPPPPPPYYYYYYYYYYYYVVVVVVVQQQQQQQQQTTTTTTTTTTTTTTHHHHHHHHHHRRRRRRRRRRRVVVVVVVSSSSSSGGGGLLLLLLLLMMMMMMMMLLLLLLLLAAAAANNNNNNNNHHHHHHHHHHTTTTTTTSSSSSSIIIIIIIIRRRRRRRRRRRHHHHHHHHHHLLLLLLLLFFFFFFFFFFFSSSSSSKKKKKKKKKCCCCCCLLLLLLLLGGGGQQQQQQQQQYYYYYYYYYYYYEEEEEEEEEKKKKKKKKKLLLLLLLLRRRRRRRRRRRKKKKKKKKKKKKKKKKKKQQQQQQQQQAAAAAFFFFFFFFFFFLLLLLLLLDDDDDDDDNNNNNNNNYYYYYYYYYYYYRRRRRRRRRRRKKKKKKKKKFFFFFFFFFFFPPPPPPPMMMMMMMMFFFFFFFFFFFAAAAADDDDDDDDNNNNNNNNDDDDDDDDLLLLLLLLSSSSSSEEEEEEEEEFFFFFFFFFFFDDDDDDDDEEEEEEEEESSSSSSRRRRRRRRRRREEEEEEEEEIIIIIIIIIIIIIIIIEEEEEEEEESSSSSSLLLLLLLLVVVVVVVDDDDDDDDEEEEEEEEEYYYYYYYYYYYYKKKKKKKKKAAAAACCCCCCEEEEEEEEESSSSSSPPPPPPPDDDDDDDDYYYYYYYYYYYYIIIIIIIIKKKKKKKKKWWWWWWWWWWWWWWGGGGMMMMMMMMEEEEEEEEEDDDDDDDDPPPPPPPGGGGEEEEEEEEEAAAAANNNNNNNNVVVVVVVVVVVVVVAAAAAAAAAALLLLLLLLDDDDDDDDSSSSSSKKKKKKKKKLLLLLLLLVVVVVVVVVVVVVVV

SEQ ID NO: 274 - protein, 3729 aa, Anemia phyllitidis
MMMMMMMMPPPPPPPRRRRRRRRRRREEEEEEEEEIIIIIIIIIIIIIIIITTTTTTTLLLLLLLLQQQQQQQQQVVVVVVVGGGGQQQQQQQQQCCCCCCGGGGNNNNNNNNQQQQQQQQQIIIIIIIIGGGGMMMMMMMMEEEEEEEEEFFFFFFFFFFFWWWWWWWWWWWWWWKKKKKKKKKQQQQQQQQQLLLLLLLLCCCCCCLLLLLLLLEEEEEEEEEHHHHHHHHHHGGGGIIIIIIIISSSSSSKKKKKKKKKEEEEEEEEEGGGGMMMMMMMMLLLLLLLLEEEEEEEEEDDDDDDDDFFFFFFFFFFFAAAAATTTTTTTQQQQQQQQQGGGGGGGGDDDDDDDDRRRRRRRRRRRKKKKKKKKKDDDDDDDDVVVVVVVFFFFFFFFFFFFFFFFFFFFFFYYYYYYYYYYYYQQQQQQQQQAAAAADDDDDDDDDDDDDDDDEEEEEEEEEHHHHHHHHHHYYYYYYYYYYYYIIIIIIIIPPPPPPPRRRRRRRRRRRAAAAALLLLLLLLLLLLLLLLLLLLLLLLDDDDDDDDLLLLLLLLEEEEEEEEEPPPPPPPRRRRRRRRRRRVVVVVVVIIIIIIIINNNNNNNNGGGGIIIIIIIIQQQQQQQQQNNNNNNNNSSSSSSEEEEEEEEEYYYYYYYYYYYYRRRRRRRRRRRNNNNNNNNLLLLLLLLYYYYYYYYYYYYNNNNNNNNHHHHHHHHHHEEEEEEEEENNNNNNNNVVVVVVVFFFFFFFFFFFVVVVVVVAAAAADDDDDDDDHHHHHHHHHHGGGGGGGGGGGGAAAAAGGGGNNNNNNNNNNNNNNNNWWWWWWWWWWWWWWAAAAASSSSSSGGGGYYYYYYYYYYYYHHHHHHHHHHQQQQQQQQQGGGGEEEEEEEEEQQQQQQQQQVVVVVVVEEEEEEEEEEEEEEEEEEDDDDDDDDIIIIIIIIMMMMMMMMDDDDDDDDMMMMMMMMIIIIIIIIDDDDDDDDRRRRRRRRRRREEEEEEEEEAAAAADDDDDDDDGGGGSSSSSSDDDDDDDDSSSSSSLLLLLLLLEEEEEEEEEGGGGFFFFFFFFFFFVVVVVVVLLLLLLLLCCCCCCHHHHHHHHHHSSSSSSIIIIIIIIAAAAAGGGGGGGGTTTTTTTGGGGSSSSSSGGGGMMMMMMMMGGGGSSSSSSYYYYYYYYYYYYLLLLLLLLLLLLLLLLEEEEEEEEEAAAAALLLLLLLLNNNNNNNNDDDDDDDDRRRRRRRRRRRYYYYYYYYYYYYSSSSSSKKKKKKKKKKKKKKKKKKLLLLLLLLVVVVVVVQQQQQQQQQTTTTTTTYYYYYYYYYYYYSSSSSSVVVVVVVFFFFFFFFFFFPPPPPPPNNNNNNNNQQQQQQQQQMMMMMMMMEEEEEEEEETTTTTTTSSSSSSDDDDDDDDVVVVVVVVVVVVVVVVVVVVVQQQQQQQQQPPPPPPPYYYYYYYYYYYYNNNNNNNNSSSSSSLLLLLLLLLLLLLLLLTTTTTTTLLLLLLLLNNNNNNNNKKKKKKKKKRRRRRRRRRRRLLLLLLLLTTTTTTTIIIIIIIINNNNNNNNAAAAADDDDDDDDCCCCCCVVVVVVVVVVVVVVVVVVVVVLLLLLLLLDDDDDDDDNNNNNNNNTTTTTTTAAAAALLLLLLLLNNNNNNNNRRRRRRRRRRRIIIIIIIIAAAAAVVVVVVVDDDDDDDDRRRRRRRRRRRLLLLLLLLHHHHHHHHHHIIIIIIIIPPPPPPPNNNNNNNNPPPPPPPTTTTTTTFFFFFFFFFFFAAAAAQQQQQQQQQTTTTTTTNNNNNNNNSSSSSSLLLLLLLLVVVVVVVSSSSSSTTTTTTTVVVVVVVMMMMMMMMSSSSSSAAAAASSSSSSTTTTTTTTTTTTTTTTTTTTTLLLLLLLLRRRRRRRRRRRYYYYYYYYYYYYPPPPPPPGGGGYYYYYYYYYYYYMMMMMMMMNNNNNNNNNNNNNNNNDDDDDDDDLLLLLLLLVVVVVVVGGGGLLLLLLLLVVVVVVVAAAAASSSSSSLLLLLLLLIIIIIIIIPPPPPPPTTTTTTTPPPPPPPRRRRRRRRRRRCCCCCCHHHHHHHHHHFFFFFFFFFFFLLLLLLLLMMMMMMMMTTTTTTTGGGGYYYYYYYYYYYYTTTTTTTPPPPPPPLLLLLLLLTTTTTTTVVVVVVVEEEEEEEEERRRRRRRRRRRQQQQQQQQQAAAAANNNNNNNNAAAAAIIIIIIIIRRRRRRRRRRRKKKKKKKKKTTTTTTTTTTTTTTVVVVVVVLLLLLLLLDDDDDDDDVVVVVVVMMMMMMMMRRRRRRRRRRRRRRRRRRRRRRLLLLLLLLLLLLLLLLQQQQQQQQQAAAAAKKKKKKKKKNNNNNNNNIIIIIIIIMMMMMMMMVVVVVVVSSSSSSSSSSSSYYYYYYYYYYYYAAAAARRRRRRRRRRRTTTTTTTKKKKKKKKKEEEEEEEEEAAAAASSSSSSQQQQQQQQQAAAAAKKKKKKKKKYYYYYYYYYYYYIIIIIIIISSSSSSIIIIIIIILLLLLLLLNNNNNNNNIIIIIIIIIIIIIIIIQQQQQQQQQGGGGEEEEEEEEEVVVVVVVDDDDDDDDPPPPPPPTTTTTTTQQQQQQQQQVVVVVVVHHHHHHHHHHKKKKKKKKKSSSSSSLLLLLLLLQQQQQQQQQRRRRRRRRRRRIIIIIIIIRRRRRRRRRRREEEEEEEEERRRRRRRRRRRKKKKKKKKKLLLLLLLLAAAAANNNNNNNNFFFFFFFFFFFIIIIIIIIEEEEEEEEEWWWWWWWWWWWWWWGGGGPPPPPPPAAAAASSSSSSIIIIIIIIQQQQQQQQQVVVVVVVAAAAALLLLLLLLSSSSSSRRRRRRRRRRRKKKKKKKKKSSSSSSPPPPPPPYYYYYYYYYYYYVVVVVVVQQQQQQQQQTTTTTTTAAAAAHHHHHHHHHHRRRRRRRRRRRVVVVVVVSSSSSSGGGGLLLLLLLLMMMMMMMMLLLLLLLLAAAAASSSSSSHHHHHHHHHHTTTTTTTSSSSSSIIIIIIIIRRRRRRRRRRRHHHHHHHHHHLLLLLLLLFFFFFFFFFFFSSSSSSKKKKKKKKKCCCCCCIIIIIIIINNNNNNNNQQQQQQQQQYYYYYYYYYYYYEEEEEEEEEKKKKKKKKKLLLLLLLLRRRRRRRRRRRKKKKKKKKKKKKKKKKKKQQQQQQQQQAAAAAFFFFFFFFFFFLLLLLLLLDDDDDDDDNNNNNNNNYYYYYYYYYYYYRRRRRRRRRRRKKKKKKKKKFFFFFFFFFFFPPPPPPPMMMMMMMMFFFFFFFFFFFAAAAADDDDDDDDNNNNNNNNDDDDDDDDLLLLLLLLTTTTTTTEEEEEEEEEFFFFFFFFFFFDDDDDDDDEEEEEEEEESSSSSSRRRRRRRRRRREEEEEEEEEIIIIIIIIVVVVVVVQQQQQQQQQSSSSSSLLLLLLLLVVVVVVVDDDDDDDDEEEEEEEEEYYYYYYYYYYYYKKKKKKKKKAAAAACCCCCCEEEEEEEEESSSSSSAAAAADDDDDDDDYYYYYYYYYYYYIIIIIIIIKKKKKKKKKWWWWWWWWWWWWWWGGGGMMMMMMMMEEEEEEEEEDDDDDDDDRRRRRRRRRRRSSSSSSKKKKKKKKKTTTTTTTLLLLLLLLSSSSSSAAAAADDDDDDDDGGGGTTTTTTTMMMMMMMMDDDDDDDDLLLLLLLLSSSSSSLLLLLLLLPPPPPPPSSSSSSSSSSSSS

SEQ ID NO: 275 - protein, 3502 aa, Caenorhabditis elegans
MMMMMMMMSSSSSSGGGGTTTTTTTGGGGAAAAALLLLLLLLMMMMMMMMTTTTTTTVVVVVVVHHHHHHHHHHVVVVVVVGGGGQQQQQQQQQCCCCCCGGGGNNNNNNNNQQQQQQQQQLLLLLLLLAAAAAQQQQQQQQQAAAAAFFFFFFFFFFFWWWWWWWWWWWWWWKKKKKKKKKSSSSSSMMMMMMMMVVVVVVVDDDDDDDDEEEEEEEEEHHHHHHHHHHGGGGIIIIIIIINNNNNNNNEEEEEEEEERRRRRRRRRRRGGGGQQQQQQQQQTTTTTTTTTTTTTTHHHHHHHHHHEEEEEEEEEDDDDDDDDDDDDDDDDMMMMMMMMNNNNNNNNDDDDDDDDKKKKKKKKKKKKKKKKKKDDDDDDDDLLLLLLLLLLLLLLLLFFFFFFFFFFFYYYYYYYYYYYYQQQQQQQQQAAAAADDDDDDDDDDDDDDDDDDDDDDDDHHHHHHHHHHYYYYYYYYYYYYVVVVVVVPPPPPPPRRRRRRRRRRRAAAAAVVVVVVVLLLLLLLLVVVVVVVDDDDDDDDLLLLLLLLEEEEEEEEEPPPPPPPRRRRRRRRRRRVVVVVVVIIIIIIIINNNNNNNNGGGGMMMMMMMMMMMMMMMMQQQQQQQQQSSSSSSPPPPPPPNNNNNNNNFFFFFFFFFFFSSSSSSNNNNNNNNLLLLLLLLFFFFFFFFFFFNNNNNNNNTTTTTTTDDDDDDDDNNNNNNNNIIIIIIIIFFFFFFFFFFFMMMMMMMMSSSSSSDDDDDDDDHHHHHHHHHHGGGGGGGGGGGGAAAAAGGGGNNNNNNNNNNNNNNNNWWWWWWWWWWWWWWAAAAASSSSSSGGGGYYYYYYYYYYYYCCCCCCQQQQQQQQQGGGGQQQQQQQQQEEEEEEEEEVVVVVVVQQQQQQQQQEEEEEEEEEKKKKKKKKKIIIIIIIIMMMMMMMMDDDDDDDDIIIIIIIIIIIIIIIIIIIIIIIIRRRRRRRRRRREEEEEEEEEAAAAAEEEEEEEEENNNNNNNNTTTTTTTNNNNNNNNNNNNNNNNLLLLLLLLDDDDDDDDGGGGIIIIIIIILLLLLLLLFFFFFFFFFFFTTTTTTTHHHHHHHHHHSSSSSSVVVVVVVSSSSSSGGGGGGGGTTTTTTTGGGGSSSSSSGGGGTTTTTTTGGGGSSSSSSLLLLLLLLLLLLLLLLLLLLLLLLEEEEEEEEERRRRRRRRRRRLLLLLLLLRRRRRRRRRRREEEEEEEEEAAAAAFFFFFFFFFFFPPPPPPPKKKKKKKKKKKKKKKKKKVVVVVVVIIIIIIIIQQQQQQQQQTTTTTTTYYYYYYYYYYYYSSSSSSVVVVVVVFFFFFFFFFFFAAAAANNNNNNNNSSSSSSDDDDDDDDTTTTTTTSSSSSSTTTTTTTDDDDDDDDVVVVVVVVVVVVVVVVVVVVVHHHHHHHHHHPPPPPPPYYYYYYYYYYYYNNNNNNNNWWWWWWWWWWWWWWVVVVVVVLLLLLLLLSSSSSSMMMMMMMMQQQQQQQQQRRRRRRRRRRRLLLLLLLLIIIIIIIIEEEEEEEEENNNNNNNNPPPPPPPDDDDDDDDHHHHHHHHHHVVVVVVVVVVVVVVVVVVVVVLLLLLLLLDDDDDDDDNNNNNNNNAAAAAAAAAALLLLLLLLHHHHHHHHHHRRRRRRRRRRRLLLLLLLLAAAAAAAAAAGGGGKKKKKKKKKFFFFFFFFFFFKKKKKKKKKTTTTTTTDDDDDDDDTTTTTTTPPPPPPPTTTTTTTFFFFFFFFFFFDDDDDDDDHHHHHHHHHHIIIIIIIINNNNNNNNSSSSSSLLLLLLLLVVVVVVVAAAAARRRRRRRRRRRIIIIIIIIMMMMMMMMSSSSSSTTTTTTTSSSSSSTTTTTTTAAAAAPPPPPPPYYYYYYYYYYYYRRRRRRRRRRRFFFFFFFFFFFNNNNNNNNSSSSSSAAAAAMMMMMMMMCCCCCCPPPPPPPSSSSSSIIIIIIIIRRRRRRRRRRRYYYYYYYYYYYYLLLLLLLLDDDDDDDDLLLLLLLLAAAAAPPPPPPPFFFFFFFFFFFPPPPPPPPPPPPPPMMMMMMMMHHHHHHHHHHFFFFFFFFFFFIIIIIIIIQQQQQQQQQSSSSSSAAAAAIIIIIIIISSSSSSPPPPPPPVVVVVVVVVVVVVVDDDDDDDDPPPPPPPNNNNNNNNEEEEEEEEENNNNNNNNFFFFFFFFFFFTTTTTTTRRRRRRRRRRRKKKKKKKKKTTTTTTTSSSSSSVVVVVVVAAAAADDDDDDDDVVVVVVVTTTTTTTRRRRRRRRRRRFFFFFFFFFFFLLLLLLLLLLLLLLLLKKKKKKKKKPPPPPPPTTTTTTTSSSSSSMMMMMMMMMMMMMMMMVVVVVVVSSSSSSTTTTTTTAAAAASSSSSSRRRRRRRRRRRVVVVVVVRRRRRRRRRRRPPPPPPPNNNNNNNNDDDDDDDDCCCCCCMMMMMMMMLLLLLLLLSSSSSSAAAAAYYYYYYYYYYYYMMMMMMMMFFFFFFFFFFFLLLLLLLLQQQQQQQQQGGGGQQQQQQQQQIIIIIIIIEEEEEEEEEAAAAAHHHHHHHHHHTTTTTTTIIIIIIIIMMMMMMMMTTTTTTTAAAAAEEEEEEEEEQQQQQQQQQNNNNNNNNVVVVVVVDDDDDDDDFFFFFFFFFFFAAAAAIIIIIIIIRRRRRRRRRRRRRRRRRRRRRRPPPPPPPPPPPPPPFFFFFFFFFFFYYYYYYYYYYYYMMMMMMMMLLLLLLLLKKKKKKKKKPPPPPPPLLLLLLLLRRRRRRRRRRRMMMMMMMMMMMMMMMMHHHHHHHHHHAAAAAPPPPPPPLLLLLLLLSSSSSSPPPPPPPYYYYYYYYYYYYVVVVVVVRRRRRRRRRRRPPPPPPPQQQQQQQQQYYYYYYYYYYYYKKKKKKKKKVVVVVVVSSSSSSGGGGLLLLLLLLLLLLLLLLLLLLLLLLNNNNNNNNNNNNNNNNSSSSSSTTTTTTTSSSSSSVVVVVVVAAAAAPPPPPPPLLLLLLLLFFFFFFFFFFFEEEEEEEEESSSSSSLLLLLLLLLLLLLLLLSSSSSSKKKKKKKKKYYYYYYYYYYYYDDDDDDDDKKKKKKKKKLLLLLLLLRRRRRRRRRRRSSSSSSKKKKKKKKKRRRRRRRRRRRAAAAAFFFFFFFFFFFIIIIIIIIDDDDDDDDKKKKKKKKKFFFFFFFFFFFEEEEEEEEEKKKKKKKKKIIIIIIIIDDDDDDDDNNNNNNNNFFFFFFFFFFFSSSSSSLLLLLLLLDDDDDDDDMMMMMMMMMMMMMMMMDDDDDDDDDDDDDDDDAAAAAMMMMMMMMHHHHHHHHHHIIIIIIIIVVVVVVVQQQQQQQQQDDDDDDDDLLLLLLLLLLLLLLLLDDDDDDDDEEEEEEEEEYYYYYYYYYYYYKKKKKKKKKAAAAAVVVVVVVVVVVVVVQQQQQQQQQKKKKKKKKKDDDDDDDDYYYYYYYYYYYYLLLLLLLLTTTTTTTRRRRRRRRRRRGGGGLLLLLLLLL

SEQ ID NO: 276 - protein, 3974 aa, Candida albicans
MMMMMMMMPPPPPPPGGGGEEEEEEEEETTTTTTTIIIIIIIITTTTTTTLLLLLLLLQQQQQQQQQVVVVVVVGGGGQQQQQQQQQCCCCCCGGGGNNNNNNNNQQQQQQQQQVVVVVVVGGGGLLLLLLLLQQQQQQQQQYYYYYYYYYYYYWWWWWWWWWWWWWWQQQQQQQQQQQQQQQQQQLLLLLLLLAAAAATTTTTTTEEEEEEEEEHHHHHHHHHHGGGGIIIIIIIIQQQQQQQQQSSSSSSDDDDDDDDGGGGSSSSSSSSSSSSTTTTTTTPPPPPPPYYYYYYYYYYYYPPPPPPPKKKKKKKKKDDDDDDDDIIIIIIIINNNNNNNNDDDDDDDDLLLLLLLLQQQQQQQQQLLLLLLLLQQQQQQQQQEEEEEEEEELLLLLLLLNNNNNNNNNNNNNNNNSSSSSSGGGGSSSSSSSSSSSSPPPPPPPQQQQQQQQQSSSSSSYYYYYYYYYYYYPPPPPPPQQQQQQQQQQQQQQQQQQTTTTTTTKKKKKKKKKPPPPPPPNNNNNNNNGGGGKKKKKKKKKYYYYYYYYYYYYRRRRRRRRRRRNNNNNNNNDDDDDDDDHHHHHHHHHHPPPPPPPEEEEEEEEELLLLLLLLFFFFFFFFFFFFFFFFFFFFFFTTTTTTTLLLLLLLLSSSSSSDDDDDDDDSSSSSSNNNNNNNNTTTTTTTYYYYYYYYYYYYTTTTTTTPPPPPPPRRRRRRRRRRRSSSSSSIIIIIIIILLLLLLLLIIIIIIIIDDDDDDDDMMMMMMMMEEEEEEEEEPPPPPPPSSSSSSVVVVVVVIIIIIIIIAAAAAKKKKKKKKKSSSSSSTTTTTTTSSSSSSAAAAALLLLLLLLPPPPPPPMMMMMMMMFFFFFFFFFFFNNNNNNNNPPPPPPPRRRRRRRRRRRNNNNNNNNVVVVVVVHHHHHHHHHHLLLLLLLLSSSSSSNNNNNNNNQQQQQQQQQGGGGNNNNNNNNGGGGAAAAAAAAAANNNNNNNNNNNNNNNNWWWWWWWWWWWWWWIIIIIIIINNNNNNNNGGGGYYYYYYYYYYYYKKKKKKKKKYYYYYYYYYYYYGGGGTTTTTTTEEEEEEEEEEEEEEEEEEEEEEEEEEEEEEEEEEEETTTTTTTLLLLLLLLLLLLLLLLNNNNNNNNLLLLLLLLIIIIIIIIDDDDDDDDRRRRRRRRRRREEEEEEEEEVVVVVVVDDDDDDDDKKKKKKKKKCCCCCCDDDDDDDDNNNNNNNNLLLLLLLLSSSSSSNNNNNNNNFFFFFFFFFFFQQQQQQQQQLLLLLLLLFFFFFFFFFFFHHHHHHHHHHSSSSSSVVVVVVVAAAAAGGGGGGGGTTTTTTTGGGGSSSSSSGGGGVVVVVVVGGGGSSSSSSKKKKKKKKKMMMMMMMMLLLLLLLLEEEEEEEEEVVVVVVVIIIIIIIISSSSSSDDDDDDDDRRRRRRRRRRRYYYYYYYYYYYYGGGGHHHHHHHHHHKKKKKKKKKKKKKKKKKKLLLLLLLLLLLLLLLLNNNNNNNNTTTTTTTFFFFFFFFFFFSSSSSSIIIIIIIIFFFFFFFFFFFPPPPPPPSSSSSSNNNNNNNNEEEEEEEEEDDDDDDDDTTTTTTTSSSSSSDDDDDDDDVVVVVVVVVVVVVVVVVVVVVQQQQQQQQQPPPPPPPYYYYYYYYYYYYNNNNNNNNTTTTTTTIIIIIIIILLLLLLLLTTTTTTTLLLLLLLLKKKKKKKKKRRRRRRRRRRRLLLLLLLLIIIIIIIIDDDDDDDDYYYYYYYYYYYYSSSSSSDDDDDDDDAAAAATTTTTTTFFFFFFFFFFFVVVVVVVFFFFFFFFFFFHHHHHHHHHHNNNNNNNNDDDDDDDDSSSSSSLLLLLLLLNNNNNNNNRRRRRRRRRRRIIIIIIIIEEEEEEEEENNNNNNNNIIIIIIIILLLLLLLLFFFFFFFFFFFNNNNNNNNNNNNNNNNNNNNNNNNSSSSSSNNNNNNNNIIIIIIIIQQQQQQQQQHHHHHHHHHHDDDDDDDDDDDDDDDDNNNNNNNNDDDDDDDDLLLLLLLLFFFFFFFFFFFLLLLLLLLGGGGAAAAANNNNNNNNKKKKKKKKKLLLLLLLLIIIIIIIIAAAAALLLLLLLLVVVVVVVSSSSSSAAAAASSSSSSVVVVVVVSSSSSSNNNNNNNNPPPPPPPLLLLLLLLRRRRRRRRRRRFFFFFFFFFFFPPPPPPPGGGGYYYYYYYYYYYYMMMMMMMMYYYYYYYYYYYYSSSSSSSSSSSSMMMMMMMMEEEEEEEEESSSSSSIIIIIIIIVVVVVVVSSSSSSNNNNNNNNLLLLLLLLIIIIIIIIPPPPPPPTTTTTTTPPPPPPPDDDDDDDDLLLLLLLLKKKKKKKKKFFFFFFFFFFFLLLLLLLLTTTTTTTSSSSSSSSSSSSIIIIIIIIAAAAAPPPPPPPFFFFFFFFFFFSSSSSSTTTTTTTQQQQQQQQQKKKKKKKKKHHHHHHHHHHNNNNNNNNYYYYYYYYYYYYLLLLLLLLNNNNNNNNEEEEEEEEEYYYYYYYYYYYYDDDDDDDDMMMMMMMMLLLLLLLLLLLLLLLLEEEEEEEEELLLLLLLLSSSSSSNNNNNNNNDDDDDDDDRRRRRRRRRRRYYYYYYYYYYYYKKKKKKKKKTTTTTTTNNNNNNNNRRRRRRRRRRRVVVVVVVGGGGGGGGDDDDDDDDTTTTTTTSSSSSSYYYYYYYYYYYYIIIIIIIISSSSSSMMMMMMMMLLLLLLLLNNNNNNNNYYYYYYYYYYYYLLLLLLLLIIIIIIIIGGGGYYYYYYYYYYYYNNNNNNNNLLLLLLLLDDDDDDDDQQQQQQQQQRRRRRRRRRRREEEEEEEEEIIIIIIIIRRRRRRRRRRRKKKKKKKKKGGGGIIIIIIIILLLLLLLLKKKKKKKKKSSSSSSQQQQQQQQQQQQQQQQQQRRRRRRRRRRRIIIIIIIISSSSSSFFFFFFFFFFFVVVVVVVPPPPPPPWWWWWWWWWWWWWWVVVVVVVAAAAARRRRRRRRRRRSSSSSSVVVVVVVLLLLLLLLVVVVVVVVVVVVVVHHHHHHHHHHGGGGKKKKKKKKKKKKKKKKKKSSSSSSPPPPPPPYYYYYYYYYYYYLLLLLLLLKKKKKKKKKNNNNNNNNTTTTTTTNNNNNNNNLLLLLLLLEEEEEEEEEGGGGIIIIIIIIQQQQQQQQQVVVVVVVTTTTTTTNNNNNNNNNNNNNNNNTTTTTTTSSSSSSMMMMMMMMIIIIIIIIDDDDDDDDVVVVVVVFFFFFFFFFFFTTTTTTTKKKKKKKKKIIIIIIIILLLLLLLLKKKKKKKKKQQQQQQQQQFFFFFFFFFFFDDDDDDDDLLLLLLLLLLLLLLLLIIIIIIIIKKKKKKKKKRRRRRRRRRRRKKKKKKKKKAAAAAYYYYYYYYYYYYLLLLLLLLNNNNNNNNRRRRRRRRRRRYYYYYYYYYYYYYYYYYYYYYYYYSSSSSSSSSSSSVVVVVVVEEEEEEEEEEEEEEEEEEEEEEEEEEENNNNNNNNEEEEEEEEEVVVVVVVMMMMMMMMEEEEEEEEEMMMMMMMMFFFFFFFFFFFNNNNNNNNEEEEEEEEESSSSSSRRRRRRRRRRREEEEEEEEESSSSSSVVVVVVVKKKKKKKKKSSSSSSIIIIIIIIIIIIIIIIDDDDDDDDEEEEEEEEEYYYYYYYYYYYYKKKKKKKKKAAAAACCCCCCKKKKKKKKKEEEEEEEEEIIIIIIIITTTTTTTYYYYYYYYYYYYLLLLLLLLDDDDDDDDDDDDDDDDDDDDDDDDDDDDDDDDEEEEEEEEEDDDDDDDDDDDDDDDDLLLLLLLLEEEEEEEEEDDDDDDDDGGGGDDDDDDDDGGGGGGGGGGGGGGGGGGGGNNNNNNNNGGGGNNNNNNNNGGGGYYYYYYYYYYYYNNNNNNNNNNNNNNNNIIIIIIIIDDDDDDDDDDDDDDDDAAAAADDDDDDDDMMMMMMMMGGGGIIIIIIII

SEQ ID NO: 277 - protein, 3661 aa, Chlamydomonas reinhardtii
MMMMMMMMPPPPPPPRRRRRRRRRRREEEEEEEEEIIIIIIIIIIIIIIIINNNNNNNNLLLLLLLLQQQQQQQQQVVVVVVVGGGGQQQQQQQQQCCCCCCGGGGNNNNNNNNQQQQQQQQQVVVVVVVGGGGSSSSSSEEEEEEEEEFFFFFFFFFFFWWWWWWWWWWWWWWRRRRRRRRRRRKKKKKKKKKLLLLLLLLCCCCCCQQQQQQQQQEEEEEEEEEHHHHHHHHHHGGGGIIIIIIIIAAAAAKKKKKKKKKDDDDDDDDGGGGRRRRRRRRRRRLLLLLLLLEEEEEEEEEDDDDDDDDFFFFFFFFFFFAAAAATTTTTTTLLLLLLLLGGGGGGGGDDDDDDDDRRRRRRRRRRRKKKKKKKKKDDDDDDDDVVVVVVVFFFFFFFFFFFFFFFFFFFFFFYYYYYYYYYYYYQQQQQQQQQAAAAADDDDDDDDDDDDDDDDEEEEEEEEEQQQQQQQQQYYYYYYYYYYYYIIIIIIIIPPPPPPPRRRRRRRRRRRAAAAAIIIIIIIILLLLLLLLLLLLLLLLDDDDDDDDLLLLLLLLEEEEEEEEEPPPPPPPRRRRRRRRRRRVVVVVVVIIIIIIIINNNNNNNNGGGGIIIIIIIIQQQQQQQQQTTTTTTTSSSSSSDDDDDDDDLLLLLLLLRRRRRRRRRRRNNNNNNNNLLLLLLLLFFFFFFFFFFFNNNNNNNNPPPPPPPEEEEEEEEENNNNNNNNIIIIIIIIFFFFFFFFFFFIIIIIIIISSSSSSKKKKKKKKKEEEEEEEEEGGGGGGGGGGGGAAAAAGGGGNNNNNNNNNNNNNNNNWWWWWWWWWWWWWWAAAAASSSSSSGGGGYYYYYYYYYYYYTTTTTTTQQQQQQQQQGGGGEEEEEEEEEAAAAAVVVVVVVQQQQQQQQQEEEEEEEEETTTTTTTLLLLLLLLLLLLLLLLDDDDDDDDMMMMMMMMIIIIIIIIDDDDDDDDRRRRRRRRRRREEEEEEEEEAAAAAEEEEEEEEEYYYYYYYYYYYYCCCCCCDDDDDDDDSSSSSSLLLLLLLLEEEEEEEEEGGGGFFFFFFFFFFFNNNNNNNNMMMMMMMMCCCCCCHHHHHHHHHHSSSSSSIIIIIIIIAAAAAGGGGGGGGTTTTTTTGGGGSSSSSSGGGGMMMMMMMMGGGGSSSSSSYYYYYYYYYYYYMMMMMMMMLLLLLLLLEEEEEEEEELLLLLLLLIIIIIIIISSSSSSDDDDDDDDRRRRRRRRRRRYYYYYYYYYYYYSSSSSSKKKKKKKKKKKKKKKKKKLLLLLLLLIIIIIIIIQQQQQQQQQTTTTTTTYYYYYYYYYYYYSSSSSSVVVVVVVFFFFFFFFFFFPPPPPPPNNNNNNNNQQQQQQQQQSSSSSSEEEEEEEEESSSSSSSSSSSSDDDDDDDDVVVVVVVVVVVVVVVVVVVVVQQQQQQQQQPPPPPPPYYYYYYYYYYYYNNNNNNNNSSSSSSLLLLLLLLLLLLLLLLTTTTTTTLLLLLLLLKKKKKKKKKRRRRRRRRRRRLLLLLLLLTTTTTTTLLLLLLLLHHHHHHHHHHAAAAADDDDDDDDAAAAAVVVVVVVVVVVVVVVVVVVVVLLLLLLLLDDDDDDDDNNNNNNNNTTTTTTTAAAAALLLLLLLLDDDDDDDDKKKKKKKKKIIIIIIIIAAAAAVVVVVVVEEEEEEEEERRRRRRRRRRRLLLLLLLLHHHHHHHHHHLLLLLLLLHHHHHHHHHHKKKKKKKKKPPPPPPPDDDDDDDDVVVVVVVQQQQQQQQQQQQQQQQQQIIIIIIIINNNNNNNNSSSSSSLLLLLLLLIIIIIIIIAAAAATTTTTTTVVVVVVVMMMMMMMMAAAAAAAAAASSSSSSTTTTTTTTTTTTTTTTTTTTTLLLLLLLLRRRRRRRRRRRYYYYYYYYYYYYPPPPPPPGGGGYYYYYYYYYYYYMMMMMMMMNNNNNNNNNNNNNNNNDDDDDDDDLLLLLLLLVVVVVVVGGGGLLLLLLLLVVVVVVVAAAAASSSSSSLLLLLLLLIIIIIIIIPPPPPPPTTTTTTTPPPPPPPRRRRRRRRRRRCCCCCCHHHHHHHHHHFFFFFFFFFFFLLLLLLLLMMMMMMMMTTTTTTTGGGGYYYYYYYYYYYYTTTTTTTPPPPPPPLLLLLLLLTTTTTTTAAAAAEEEEEEEEENNNNNNNNAAAAAAAAAAGGGGQQQQQQQQQVVVVVVVTTTTTTTSSSSSSNNNNNNNNIIIIIIIIRRRRRRRRRRRKKKKKKKKKTTTTTTTTTTTTTTVVVVVVVLLLLLLLLDDDDDDDDVVVVVVVMMMMMMMMRRRRRRRRRRRRRRRRRRRRRRLLLLLLLLLLLLLLLLQQQQQQQQQPPPPPPPKKKKKKKKKNNNNNNNNIIIIIIIIMMMMMMMMVVVVVVVSSSSSSTTTTTTTHHHHHHHHHHTTTTTTTKKKKKKKKKSSSSSSRRRRRRRRRRRDDDDDDDDIIIIIIIIAAAAANNNNNNNNAAAAAKKKKKKKKKYYYYYYYYYYYYIIIIIIIISSSSSSIIIIIIIILLLLLLLLNNNNNNNNIIIIIIIIIIIIIIIIQQQQQQQQQGGGGEEEEEEEEEVVVVVVVDDDDDDDDPPPPPPPSSSSSSQQQQQQQQQVVVVVVVHHHHHHHHHHKKKKKKKKKSSSSSSLLLLLLLLQQQQQQQQQRRRRRRRRRRRIIIIIIIIRRRRRRRRRRREEEEEEEEERRRRRRRRRRRKKKKKKKKKQQQQQQQQQAAAAANNNNNNNNFFFFFFFFFFFIIIIIIIIEEEEEEEEEWWWWWWWWWWWWWWGGGGPPPPPPPAAAAASSSSSSIIIIIIIIQQQQQQQQQVVVVVVVAAAAALLLLLLLLSSSSSSKKKKKKKKKKKKKKKKKKSSSSSSPPPPPPPYYYYYYYYYYYYVVVVVVVQQQQQQQQQTTTTTTTAAAAAHHHHHHHHHHRRRRRRRRRRRVVVVVVVSSSSSSGGGGLLLLLLLLMMMMMMMMLLLLLLLLAAAAANNNNNNNNHHHHHHHHHHTTTTTTTSSSSSSVVVVVVVRRRRRRRRRRRHHHHHHHHHHLLLLLLLLFFFFFFFFFFFNNNNNNNNKKKKKKKKKVVVVVVVLLLLLLLLRRRRRRRRRRRDDDDDDDDYYYYYYYYYYYYEEEEEEEEEKKKKKKKKKLLLLLLLLMMMMMMMMGGGGPPPPPPPKKKKKKKKKQQQQQQQQQEEEEEEEEERRRRRRRRRRRQQQQQQQQQAAAAAFFFFFFFFFFFMMMMMMMMQQQQQQQQQAAAAAYYYYYYYYYYYYRRRRRRRRRRRDDDDDDDDVVVVVVVPPPPPPPRRRRRRRRRRRFFFFFFFFFFFAAAAADDDDDDDDAAAAAAAAAAGGGGGGGGGGGGTTTTTTTAAAAALLLLLLLLLLLLLLLLEEEEEEEEEEEEEEEEEEFFFFFFFFFFFAAAAADDDDDDDDAAAAAKKKKKKKKKEEEEEEEEEVVVVVVVVVVVVVVQQQQQQQQQDDDDDDDDLLLLLLLLAAAAANNNNNNNNEEEEEEEEEYYYYYYYYYYYYAAAAAAAAAACCCCCCEEEEEEEEESSSSSSAAAAADDDDDDDDYYYYYYYYYYYYIIIIIIIIQQQQQQQQQRRRRRRRRRRRQQQQQQQQQMMMMMMMMMMMMMMMMAAAAASSSSSSS

SEQ ID NO: 278 - protein, 2072 aa, Cochliobolus heterostrophus
LLLLLLLLAAAAADDDDDDDDLLLLLLLLEEEEEEEEEPPPPPPPRRRRRRRRRRRVVVVVVVLLLLLLLLHHHHHHHHHHSSSSSSIIIIIIIIQQQQQQQQQAAAAASSSSSSPPPPPPPYYYYYYYYYYYYKKKKKKKKKNNNNNNNNIIIIIIIIYYYYYYYYYYYYNNNNNNNNPPPPPPPEEEEEEEEENNNNNNNNFFFFFFFFFFFYYYYYYYYYYYYIIIIIIIIHHHHHHHHHHKKKKKKKKKDDDDDDDDGGGGTTTTTTTGGGGAAAAAGGGGNNNNNNNNNNNNNNNNWWWWWWWWWWWWWWGGGGMMMMMMMMGGGGYYYYYYYYYYYYSSSSSSMMMMMMMMGGGGEEEEEEEEEQQQQQQQQQVVVVVVVHHHHHHHHHHEEEEEEEEEDDDDDDDDIIIIIIIIWWWWWWWWWWWWWWDDDDDDDDMMMMMMMMIIIIIIIIDDDDDDDDRRRRRRRRRRREEEEEEEEEAAAAADDDDDDDDGGGGSSSSSSDDDDDDDDSSSSSSLLLLLLLLEEEEEEEEEGGGGFFFFFFFFFFFMMMMMMMMMMMMMMMMLLLLLLLLHHHHHHHHHHSSSSSSIIIIIIIIAAAAAGGGGGGGGTTTTTTTGGGGSSSSSSGGGGLLLLLLLLGGGGSSSSSSYYYYYYYYYYYYMMMMMMMMLLLLLLLLEEEEEEEEERRRRRRRRRRRLLLLLLLLNNNNNNNNDDDDDDDDRRRRRRRRRRRFFFFFFFFFFFPPPPPPPKKKKKKKKKKKKKKKKKKLLLLLLLLIIIIIIIIQQQQQQQQQTTTTTTTYYYYYYYYYYYYSSSSSSVVVVVVVFFFFFFFFFFFPPPPPPPNNNNNNNNTTTTTTTQQQQQQQQQDDDDDDDDGGGGDDDDDDDDIIIIIIIIVVVVVVVVVVVVVVQQQQQQQQQPPPPPPPYYYYYYYYYYYYNNNNNNNNSSSSSSLLLLLLLLLLLLLLLLSSSSSSMMMMMMMMRRRRRRRRRRRRRRRRRRRRRRLLLLLLLLTTTTTTTQQQQQQQQQNNNNNNNNAAAAADDDDDDDDSSSSSSVVVVVVVVVVVVVVVVVVVVVLLLLLLLLDDDDDDDDNNNNNNNNGGGGAAAAALLLLLLLLTTTTTTTRRRRRRRRRRRIIIIIIIIAAAAAAAAAADDDDDDDDRRRRRRRRRRRLLLLLLLLHHHHHHHHHHVVVVVVVMMMMMMMMTTTTTTTPPPPPPPSSSSSSFFFFFFFFFFFEEEEEEEEEQQQQQQQQQTTTTTTTNNNNNNNNQQQQQQQQQLLLLLLLLVVVVVVVSSSSSSTTTTTTTVVVVVVVMMMMMMMMSSSSSSAAAAASSSSSSTTTTTTTTTTTTTTTTTTTTTLLLLLLLLRRRRRRRRRRRYYYYYYYYYYYYPPPPPPPAAAAAYYYYYYYYYYYYSSSSSSHHHHHHHHHHNNNNNNNNDDDDDDDDLLLLLLLLVVVVVVVGGGGIIIIIIIIVVVVVVVAAAAASSSSSSLLLLLLLLIIIIIIIIPPPPPPPTTTTTTTPPPPPPPRRRRRRRRRRRCCCCCCHHHHHHHHHHFFFFFFFFFFFLLLLLLLLMMMMMMMMTTTTTTTSSSSSSYYYYYYYYYYYYTTTTTTTFFFFFFFFFFFSSSSSSGGGGEEEEEEEEENNNNNNNNVVVVVVVEEEEEEEEEQQQQQQQQQAAAAAKKKKKKKKKTTTTTTTVVVVVVVRRRRRRRRRRRKKKKKKKKKTTTTTTTTTTTTTTVVVVVVVLLLLLLLLDDDDDDDDVVVVVVVMMMMMMMMRRRRRRRRRRRRRRRRRRRRRRLLLLLLLLLLLLLLLLQQQQQQQQQPPPPPPPKKKKKKKKKNNNNNNNNRRRRRRRRRRRMMMMMMMMVVVVVVVSSSSSSTTTTTTTNNNNNNNNPPPPPPPTTTTTTTSSSSSSHHHHHHHHHHKKKKKKKKKSSSSSSCCCCCCYYYYYYYYYYYYMMMMMMMMSSSSSSIIIIIIIILLLLLLLLNNNNNNNNIIIIIIIIIIIIIIIIQQQQQQQQQAAAAAKKKKKKKKKPPPPPPPTTTTTTTPPPPPPPQQQQQQQQQQ

SEQ ID NO: 279 - protein, 3575 aa, Emericella nidulans
MMMMMMMMPPPPPPPRRRRRRRRRRREEEEEEEEEIIIIIIIIIIIIIIIITTTTTTTIIIIIIIIQQQQQQQQQAAAAAGGGGQQQQQQQQQCCCCCCGGGGNNNNNNNNNNNNNNNNVVVVVVVGGGGSSSSSSQQQQQQQQQFFFFFFFFFFFWWWWWWWWWWWWWWQQQQQQQQQQQQQQQQQQLLLLLLLLCCCCCCLLLLLLLLEEEEEEEEEHHHHHHHHHHGGGGIIIIIIIISSSSSSQQQQQQQQQDDDDDDDDGGGGNNNNNNNNLLLLLLLLEEEEEEEEEEEEEEEEEEFFFFFFFFFFFAAAAATTTTTTTEEEEEEEEEGGGGGGGGDDDDDDDDRRRRRRRRRRRKKKKKKKKKDDDDDDDDVVVVVVVFFFFFFFFFFFFFFFFFFFFFFYYYYYYYYYYYYQQQQQQQQQSSSSSSDDDDDDDDDDDDDDDDTTTTTTTRRRRRRRRRRRYYYYYYYYYYYYIIIIIIIIPPPPPPPRRRRRRRRRRRAAAAAIIIIIIIILLLLLLLLLLLLLLLLDDDDDDDDLLLLLLLLEEEEEEEEEPPPPPPPRRRRRRRRRRRVVVVVVVLLLLLLLLNNNNNNNNGGGGIIIIIIIIQQQQQQQQQSSSSSSGGGGPPPPPPPYYYYYYYYYYYYKKKKKKKKKNNNNNNNNIIIIIIIIYYYYYYYYYYYYNNNNNNNNPPPPPPPEEEEEEEEENNNNNNNNFFFFFFFFFFFFFFFFFFFFFFIIIIIIIIGGGGQQQQQQQQQQQQQQQQQQGGGGIIIIIIIIGGGGAAAAAGGGGNNNNNNNNNNNNNNNNWWWWWWWWWWWWWWGGGGAAAAAGGGGYYYYYYYYYYYYAAAAAAAAAAGGGGEEEEEEEEEVVVVVVVVVVVVVVQQQQQQQQQEEEEEEEEEEEEEEEEEEVVVVVVVFFFFFFFFFFFDDDDDDDDMMMMMMMMIIIIIIIIDDDDDDDDRRRRRRRRRRREEEEEEEEEAAAAADDDDDDDDGGGGSSSSSSDDDDDDDDSSSSSSLLLLLLLLEEEEEEEEEGGGGFFFFFFFFFFFMMMMMMMMFFFFFFFFFFFLLLLLLLLHHHHHHHHHHSSSSSSIIIIIIIIAAAAAGGGGGGGGTTTTTTTGGGGSSSSSSGGGGLLLLLLLLGGGGSSSSSSFFFFFFFFFFFLLLLLLLLLLLLLLLLEEEEEEEEERRRRRRRRRRRMMMMMMMMNNNNNNNNDDDDDDDDRRRRRRRRRRRFFFFFFFFFFFPPPPPPPKKKKKKKKKKKKKKKKKKLLLLLLLLIIIIIIIIQQQQQQQQQTTTTTTTYYYYYYYYYYYYSSSSSSVVVVVVVFFFFFFFFFFFPPPPPPPDDDDDDDDTTTTTTTQQQQQQQQQAAAAAAAAAADDDDDDDDVVVVVVVVVVVVVVVVVVVVVNNNNNNNNPPPPPPPYYYYYYYYYYYYNNNNNNNNSSSSSSLLLLLLLLLLLLLLLLAAAAAMMMMMMMMRRRRRRRRRRRRRRRRRRRRRRLLLLLLLLTTTTTTTQQQQQQQQQNNNNNNNNAAAAADDDDDDDDSSSSSSVVVVVVVVVVVVVVVVVVVVVLLLLLLLLDDDDDDDDNNNNNNNNAAAAAAAAAALLLLLLLLSSSSSSRRRRRRRRRRRIIIIIIIIVVVVVVVAAAAADDDDDDDDRRRRRRRRRRRLLLLLLLLHHHHHHHHHHVVVVVVVQQQQQQQQQEEEEEEEEEPPPPPPPSSSSSSFFFFFFFFFFFQQQQQQQQQQQQQQQQQQTTTTTTTNNNNNNNNRRRRRRRRRRRLLLLLLLLVVVVVVVSSSSSSTTTTTTTVVVVVVVMMMMMMMMSSSSSSAAAAASSSSSSTTTTTTTTTTTTTTTTTTTTTLLLLLLLLRRRRRRRRRRRYYYYYYYYYYYYPPPPPPPGGGGYYYYYYYYYYYYMMMMMMMMHHHHHHHHHHNNNNNNNNDDDDDDDDLLLLLLLLVVVVVVVGGGGIIIIIIIIIIIIIIIIAAAAASSSSSSLLLLLLLLIIIIIIIIPPPPPPPTTTTTTTPPPPPPPRRRRRRRRRRRSSSSSSHHHHHHHHHHFFFFFFFFFFFLLLLLLLLLLLLLLLLTTTTTTTSSSSSSYYYYYYYYYYYYTTTTTTTPPPPPPPFFFFFFFFFFFTTTTTTTGGGGDDDDDDDDNNNNNNNNIIIIIIIIDDDDDDDDQQQQQQQQQAAAAAKKKKKKKKKTTTTTTTVVVVVVVRRRRRRRRRRRKKKKKKKKKTTTTTTTTTTTTTTVVVVVVVLLLLLLLLDDDDDDDDVVVVVVVMMMMMMMMRRRRRRRRRRRRRRRRRRRRRRLLLLLLLLLLLLLLLLQQQQQQQQQPPPPPPPKKKKKKKKKNNNNNNNNRRRRRRRRRRRMMMMMMMMVVVVVVVSSSSSSIIIIIIIINNNNNNNNPPPPPPPSSSSSSKKKKKKKKKSSSSSSSSSSSSCCCCCCYYYYYYYYYYYYIIIIIIIISSSSSSIIIIIIIILLLLLLLLNNNNNNNNIIIIIIIIIIIIIIIIQQQQQQQQQGGGGEEEEEEEEEAAAAADDDDDDDDPPPPPPPTTTTTTTDDDDDDDDVVVVVVVHHHHHHHHHHKKKKKKKKKSSSSSSLLLLLLLLLLLLLLLLRRRRRRRRRRRIIIIIIIIRRRRRRRRRRREEEEEEEEERRRRRRRRRRRRRRRRRRRRRRLLLLLLLLAAAAASSSSSSFFFFFFFFFFFIIIIIIIIPPPPPPPWWWWWWWWWWWWWWGGGGPPPPPPPAAAAASSSSSSIIIIIIIIQQQQQQQQQVVVVVVVAAAAALLLLLLLLTTTTTTTKKKKKKKKKKKKKKKKKKSSSSSSPPPPPPPYYYYYYYYYYYYIIIIIIIIQQQQQQQQQNNNNNNNNTTTTTTTHHHHHHHHHHRRRRRRRRRRRVVVVVVVSSSSSSGGGGLLLLLLLLMMMMMMMMLLLLLLLLAAAAANNNNNNNNHHHHHHHHHHTTTTTTTSSSSSSVVVVVVVAAAAATTTTTTTLLLLLLLLFFFFFFFFFFFKKKKKKKKKRRRRRRRRRRRIIIIIIIIVVVVVVVQQQQQQQQQQQQQQQQQQYYYYYYYYYYYYDDDDDDDDRRRRRRRRRRRLLLLLLLLRRRRRRRRRRRKKKKKKKKKRRRRRRRRRRRNNNNNNNNAAAAAFFFFFFFFFFFLLLLLLLLEEEEEEEEEQQQQQQQQQYYYYYYYYYYYYKKKKKKKKKKKKKKKKKKEEEEEEEEEAAAAAPPPPPPPFFFFFFFFFFFQQQQQQQQQDDDDDDDDGGGGLLLLLLLLDDDDDDDDEEEEEEEEEFFFFFFFFFFFDDDDDDDDEEEEEEEEEAAAAARRRRRRRRRRRAAAAAVVVVVVVVVVVVVVMMMMMMMMDDDDDDDDLLLLLLLLVVVVVVVGGGGEEEEEEEEEYYYYYYYYYYYYEEEEEEEEEAAAAAAAAAAEEEEEEEEERRRRRRRRRRREEEEEEEEENNNNNNNNYYYYYYYYYYYYLLLLLLLLDDDDDDDDPPPPPPPDDDDDDDDAAAAAGGGGKKKKKKKKKDDDDDDDDEEEEEEEEEVVVVVVVGGGGVVVVVVVV

SEQ ID NO: 280 - protein, 3650 aa, Entamoeba histolytica
MMMMMMMMPPPPPPPRRRRRRRRRRREEEEEEEEEIIIIIIIIIIIIIIIITTTTTTTLLLLLLLLNNNNNNNNVVVVVVVGGGGQQQQQQQQQCCCCCCGGGGNNNNNNNNQQQQQQQQQLLLLLLLLGGGGSSSSSSEEEEEEEEEFFFFFFFFFFFFFFFFFFFFFFKKKKKKKKKKKKKKKKKKIIIIIIIICCCCCCSSSSSSEEEEEEEEEHHHHHHHHHHGGGGIIIIIIIILLLLLLLLPPPPPPPDDDDDDDDGGGGSSSSSSLLLLLLLLSSSSSSTTTTTTTNNNNNNNNEEEEEEEEEFFFFFFFFFFFIIIIIIIIDDDDDDDDDDDDDDDDRRRRRRRRRRRKKKKKKKKKDDDDDDDDVVVVVVVFFFFFFFFFFFFFFFFFFFFFFYYYYYYYYYYYYQQQQQQQQQAAAAADDDDDDDDDDDDDDDDQQQQQQQQQRRRRRRRRRRRYYYYYYYYYYYYVVVVVVVPPPPPPPRRRRRRRRRRRSSSSSSIIIIIIIINNNNNNNNIIIIIIIIDDDDDDDDLLLLLLLLEEEEEEEEEPPPPPPPRRRRRRRRRRRVVVVVVVLLLLLLLLDDDDDDDDSSSSSSIIIIIIIIRRRRRRRRRRRTTTTTTTSSSSSSEEEEEEEEEWWWWWWWWWWWWWWRRRRRRRRRRRNNNNNNNNFFFFFFFFFFFYYYYYYYYYYYYNNNNNNNNPPPPPPPEEEEEEEEENNNNNNNNFFFFFFFFFFFIIIIIIIIIIIIIIIIPPPPPPPTTTTTTTNNNNNNNNNNNNNNNNGGGGAAAAAGGGGNNNNNNNNSSSSSSWWWWWWWWWWWWWWAAAAANNNNNNNNGGGGYYYYYYYYYYYYYYYYYYYYYYYYTTTTTTTTTTTTTTEEEEEEEEEKKKKKKKKKMMMMMMMMSSSSSSEEEEEEEEEIIIIIIIIEEEEEEEEEEEEEEEEEEIIIIIIIIIIIIIIIIDDDDDDDDRRRRRRRRRRREEEEEEEEEVVVVVVVEEEEEEEEEHHHHHHHHHHCCCCCCDDDDDDDDSSSSSSLLLLLLLLEEEEEEEEEGGGGFFFFFFFFFFFFFFFFFFFFFFFFFFFFFFFFFCCCCCCHHHHHHHHHHSSSSSSIIIIIIIICCCCCCGGGGGGGGTTTTTTTGGGGSSSSSSGGGGLLLLLLLLGGGGSSSSSSKKKKKKKKKIIIIIIIIMMMMMMMMEEEEEEEEEMMMMMMMMIIIIIIIISSSSSSEEEEEEEEEKKKKKKKKKYYYYYYYYYYYYPPPPPPPKKKKKKKKKNNNNNNNNIIIIIIIILLLLLLLLTTTTTTTSSSSSSFFFFFFFFFFFSSSSSSVVVVVVVMMMMMMMMVVVVVVVKKKKKKKKKEEEEEEEEENNNNNNNNPPPPPPPDDDDDDDDVVVVVVVVVVVVVVVVVVVVVSSSSSSPPPPPPPYYYYYYYYYYYYNNNNNNNNSSSSSSIIIIIIIILLLLLLLLTTTTTTTLLLLLLLLRRRRRRRRRRRRRRRRRRRRRRLLLLLLLLIIIIIIIITTTTTTTEEEEEEEEECCCCCCQQQQQQQQQSSSSSSVVVVVVVVVVVVVVVVVVVVVFFFFFFFFFFFDDDDDDDDNNNNNNNNSSSSSSAAAAALLLLLLLLAAAAADDDDDDDDIIIIIIIITTTTTTTHHHHHHHHHHTTTTTTTQQQQQQQQQFFFFFFFFFFFGGGGVVVVVVVDDDDDDDDEEEEEEEEEAAAAATTTTTTTVVVVVVVFFFFFFFFFFFDDDDDDDDMMMMMMMMNNNNNNNNSSSSSSIIIIIIIIIIIIIIIISSSSSSSSSSSSSSSSSSMMMMMMMMSSSSSSAAAAAFFFFFFFFFFFTTTTTTTAAAAANNNNNNNNLLLLLLLLRRRRRRRRRRRFFFFFFFFFFFPPPPPPPSSSSSSTTTTTTTLLLLLLLLYYYYYYYYYYYYNNNNNNNNSSSSSSLLLLLLLLNNNNNNNNSSSSSSLLLLLLLLMMMMMMMMIIIIIIIIHHHHHHHHHHLLLLLLLLCCCCCCPPPPPPPSSSSSSRRRRRRRRRRRFFFFFFFFFFFSSSSSSHHHHHHHHHHFFFFFFFFFFFLLLLLLLLMMMMMMMMTTTTTTTSSSSSSYYYYYYYYYYYYTTTTTTTPPPPPPPLLLLLLLLRRRRRRRRRRRQQQQQQQQQVVVVVVVNNNNNNNNQQQQQQQQQIIIIIIIISSSSSSSSSSSSRRRRRRRRRRRTTTTTTTSSSSSSAAAAAIIIIIIIIDDDDDDDDVVVVVVVMMMMMMMMKKKKKKKKKRRRRRRRRRRRLLLLLLLLIIIIIIIIQQQQQQQQQPPPPPPPQQQQQQQQQNNNNNNNNIIIIIIIIMMMMMMMMAAAAARRRRRRRRRRRTTTTTTTRRRRRRRRRRRLLLLLLLLKKKKKKKKKEEEEEEEEEGGGGKKKKKKKKKYYYYYYYYYYYYIIIIIIIISSSSSSMMMMMMMMCCCCCCDDDDDDDDFFFFFFFFFFFFFFFFFFFFFFQQQQQQQQQGGGGDDDDDDDDVVVVVVVSSSSSSYYYYYYYYYYYYDDDDDDDDEEEEEEEEEIIIIIIIINNNNNNNNEEEEEEEEEAAAAALLLLLLLLQQQQQQQQQRRRRRRRRRRRFFFFFFFFFFFTTTTTTTDDDDDDDDRRRRRRRRRRRRRRRRRRRRRRLLLLLLLLAAAAAEEEEEEEEEFFFFFFFFFFFVVVVVVVPPPPPPPWWWWWWWWWWWWWWNNNNNNNNKKKKKKKKKEEEEEEEEEAAAAAIIIIIIIIKKKKKKKKKVVVVVVVVVVVVVVHHHHHHHHHHTTTTTTTRRRRRRRRRRRVVVVVVVSSSSSSPPPPPPPLLLLLLLLVVVVVVVKKKKKKKKKRRRRRRRRRRRGGGGNNNNNNNNRRRRRRRRRRRMMMMMMMMSSSSSSGGGGMMMMMMMMLLLLLLLLLLLLLLLLAAAAANNNNNNNNNNNNNNNNTTTTTTTSSSSSSIIIIIIIIRRRRRRRRRRRYYYYYYYYYYYYYYYYYYYYYYYYFFFFFFFFFFFQQQQQQQQQDDDDDDDDIIIIIIIILLLLLLLLKKKKKKKKKAAAAAFFFFFFFFFFFDDDDDDDDQQQQQQQQQMMMMMMMMFFFFFFFFFFFKKKKKKKKKKKKKKKKKKRRRRRRRRRRRVVVVVVVYYYYYYYYYYYYLLLLLLLLQQQQQQQQQTTTTTTTDDDDDDDDRRRRRRRRRRRDDDDDDDDNNNNNNNNLLLLLLLLRRRRRRRRRRRKKKKKKKKKFFFFFFFFFFFPPPPPPPEEEEEEEEEFFFFFFFFFFFEEEEEEEEEEEEEEEEEESSSSSSKKKKKKKKKEEEEEEEEEIIIIIIIIVVVVVVVKKKKKKKKKCCCCCCVVVVVVVIIIIIIIIEEEEEEEEEEEEEEEEEEYYYYYYYYYYYYAAAAAKKKKKKKKKAAAAAEEEEEEEEESSSSSSIIIIIIIIEEEEEEEEEYYYYYYYYYYYYSSSSSSHHHHHHHHHHYYYYYYYYYYYYSSSSSSYYYYYYYYYYYYPPPPPPPIIIIIIIIHHHHHHHHHHKKKKKKKKKYYYYYYYYYYYYLLLLLLLLKKKKKKKKKGGGGIIIIIIIIAAAAAKKKKKKKKKEEEEEEEEEKKKKKKKKKIIIIIIIIAAAAAEEEEEEEEEE

SEQ ID NO: 281 - protein, 3661 aa, Euplotes aediculatus
MMMMMMMMPPPPPPPRRRRRRRRRRREEEEEEEEEIIIIIIIIIIIIIIIITTTTTTTCCCCCCQQQQQQQQQVVVVVVVGGGGQQQQQQQQQCCCCCCGGGGNNNNNNNNQQQQQQQQQIIIIIIIIGGGGMMMMMMMMEEEEEEEEEFFFFFFFFFFFWWWWWWWWWWWWWWKKKKKKKKKQQQQQQQQQLLLLLLLLCCCCCCMMMMMMMMEEEEEEEEEHHHHHHHHHHGGGGIIIIIIIINNNNNNNNPPPPPPPEEEEEEEEEGGGGIIIIIIIILLLLLLLLEEEEEEEEEDDDDDDDDFFFFFFFFFFFAAAAAVVVVVVVNNNNNNNNGGGGEEEEEEEEEDDDDDDDDRRRRRRRRRRRKKKKKKKKKDDDDDDDDVVVVVVVFFFFFFFFFFFFFFFFFFFFFFYYYYYYYYYYYYQQQQQQQQQAAAAADDDDDDDDDDDDDDDDEEEEEEEEEHHHHHHHHHHYYYYYYYYYYYYVVVVVVVPPPPPPPRRRRRRRRRRRAAAAAVVVVVVVLLLLLLLLIIIIIIIIDDDDDDDDLLLLLLLLEEEEEEEEEPPPPPPPRRRRRRRRRRRVVVVVVVIIIIIIIINNNNNNNNCCCCCCIIIIIIIIQQQQQQQQQKKKKKKKKKSSSSSSTTTTTTTYYYYYYYYYYYYSSSSSSSSSSSSLLLLLLLLYYYYYYYYYYYYNNNNNNNNPPPPPPPEEEEEEEEENNNNNNNNIIIIIIIIYYYYYYYYYYYYIIIIIIIIAAAAAKKKKKKKKKHHHHHHHHHHGGGGGGGGGGGGAAAAAGGGGNNNNNNNNNNNNNNNNWWWWWWWWWWWWWWGGGGRRRRRRRRRRRGGGGYYYYYYYYYYYYTTTTTTTDDDDDDDDAAAAAEEEEEEEEEKKKKKKKKKVVVVVVVQQQQQQQQQDDDDDDDDEEEEEEEEEIIIIIIIILLLLLLLLEEEEEEEEEMMMMMMMMIIIIIIIIDDDDDDDDRRRRRRRRRRREEEEEEEEEAAAAADDDDDDDDGGGGSSSSSSDDDDDDDDSSSSSSLLLLLLLLEEEEEEEEEGGGGFFFFFFFFFFFVVVVVVVLLLLLLLLTTTTTTTHHHHHHHHHHSSSSSSIIIIIIIIAAAAAGGGGGGGGTTTTTTTGGGGSSSSSSGGGGFFFFFFFFFFFGGGGSSSSSSYYYYYYYYYYYYLLLLLLLLLLLLLLLLEEEEEEEEERRRRRRRRRRRIIIIIIIINNNNNNNNDDDDDDDDHHHHHHHHHHYYYYYYYYYYYYPPPPPPPKKKKKKKKKKKKKKKKKKLLLLLLLLIIIIIIIIQQQQQQQQQTTTTTTTYYYYYYYYYYYYSSSSSSVVVVVVVFFFFFFFFFFFPPPPPPPIIIIIIIIEEEEEEEEENNNNNNNNDDDDDDDDVVVVVVVVVVVVVVVVVVVVVQQQQQQQQQPPPPPPPYYYYYYYYYYYYNNNNNNNNCCCCCCLLLLLLLLLLLLLLLLSSSSSSIIIIIIIIKKKKKKKKKRRRRRRRRRRRLLLLLLLLTTTTTTTLLLLLLLLNNNNNNNNAAAAADDDDDDDDCCCCCCVVVVVVVVVVVVVVVVVVVVVLLLLLLLLDDDDDDDDNNNNNNNNNNNNNNNNAAAAALLLLLLLLTTTTTTTSSSSSSIIIIIIIIAAAAAVVVVVVVDDDDDDDDRRRRRRRRRRRLLLLLLLLKKKKKKKKKIIIIIIIILLLLLLLLQQQQQQQQQPPPPPPPTTTTTTTFFFFFFFFFFFSSSSSSQQQQQQQQQIIIIIIIINNNNNNNNSSSSSSIIIIIIIIVVVVVVVSSSSSSTTTTTTTVVVVVVVMMMMMMMMAAAAAAAAAASSSSSSTTTTTTTTTTTTTTTTTTTTTLLLLLLLLRRRRRRRRRRRYYYYYYYYYYYYPPPPPPPGGGGYYYYYYYYYYYYMMMMMMMMNNNNNNNNNNNNNNNNDDDDDDDDMMMMMMMMVVVVVVVGGGGLLLLLLLLIIIIIIIIAAAAASSSSSSLLLLLLLLVVVVVVVPPPPPPPTTTTTTTPPPPPPPRRRRRRRRRRRCCCCCCHHHHHHHHHHFFFFFFFFFFFLLLLLLLLMMMMMMMMTTTTTTTGGGGYYYYYYYYYYYYTTTTTTTPPPPPPPLLLLLLLLSSSSSSLLLLLLLLDDDDDDDDQQQQQQQQQKKKKKKKKKYYYYYYYYYYYYTTTTTTTSSSSSSVVVVVVVRRRRRRRRRRRKKKKKKKKKTTTTTTTTTTTTTTFFFFFFFFFFFLLLLLLLLDDDDDDDDVVVVVVVMMMMMMMMRRRRRRRRRRRRRRRRRRRRRRLLLLLLLLLLLLLLLLQQQQQQQQQTTTTTTTKKKKKKKKKNNNNNNNNIIIIIIIIMMMMMMMMVVVVVVVTTTTTTTGGGGAAAAAVVVVVVVKKKKKKKKKKKKKKKKKKGGGGAAAAAYYYYYYYYYYYYMMMMMMMMSSSSSSIIIIIIIILLLLLLLLNNNNNNNNVVVVVVVIIIIIIIIQQQQQQQQQGGGGDDDDDDDDVVVVVVVDDDDDDDDPPPPPPPTTTTTTTQQQQQQQQQVVVVVVVHHHHHHHHHHKKKKKKKKKSSSSSSLLLLLLLLQQQQQQQQQRRRRRRRRRRRIIIIIIIIKKKKKKKKKEEEEEEEEERRRRRRRRRRRKKKKKKKKKLLLLLLLLAAAAANNNNNNNNFFFFFFFFFFFIIIIIIIIPPPPPPPWWWWWWWWWWWWWWGGGGPPPPPPPAAAAASSSSSSIIIIIIIIQQQQQQQQQVVVVVVVAAAAALLLLLLLLAAAAAKKKKKKKKKKKKKKKKKKSSSSSSPPPPPPPYYYYYYYYYYYYIIIIIIIIDDDDDDDDSSSSSSGGGGHHHHHHHHHHKKKKKKKKKVVVVVVVSSSSSSGGGGLLLLLLLLMMMMMMMMLLLLLLLLAAAAANNNNNNNNHHHHHHHHHHTTTTTTTGGGGIIIIIIIIRRRRRRRRRRRSSSSSSIIIIIIIIFFFFFFFFFFFKKKKKKKKKVVVVVVVLLLLLLLLYYYYYYYYYYYYDDDDDDDDQQQQQQQQQYYYYYYYYYYYYRRRRRRRRRRRTTTTTTTFFFFFFFFFFFRRRRRRRRRRRKKKKKKKKKRRRRRRRRRRRDDDDDDDDAAAAAYYYYYYYYYYYYMMMMMMMMNNNNNNNNIIIIIIIIFFFFFFFFFFFKKKKKKKKKQQQQQQQQQTTTTTTTKKKKKKKKKIIIIIIIIFFFFFFFFFFFEEEEEEEEEDDDDDDDDNNNNNNNNLLLLLLLLDDDDDDDDEEEEEEEEEFFFFFFFFFFFDDDDDDDDSSSSSSSSSSSSDDDDDDDDEEEEEEEEEVVVVVVVVVVVVVVKKKKKKKKKNNNNNNNNLLLLLLLLIIIIIIIIDDDDDDDDEEEEEEEEEYYYYYYYYYYYYAAAAAAAAAAAAAAAEEEEEEEEEKKKKKKKKKMMMMMMMMDDDDDDDDYYYYYYYYYYYYIIIIIIIINNNNNNNNWWWWWWWWWWWWWWGGGGNNNNNNNNDDDDDDDDDDDDDDDDDDDDDDDDDDDDDDDDMMMMMMMMQQQQQQQQQFFFFFFFFFFFDDDDDDDDPPPPPPPRRRRRRRRRRREEEEEEEEEPPPPPPPPPPPPPPKKKKKKKKKFFFFFFFFFFFSSSSSSNNNNNNNNIIIIIIIIQQQQQQQQQQ

SEQ ID NO: 282 - protein, 3623 aa, Neurospora crassa
MMMMMMMMPPPPPPPRRRRRRRRRRREEEEEEEEEIIIIIIIIIIIIIIIITTTTTTTIIIIIIIIQQQQQQQQQAAAAAGGGGQQQQQQQQQCCCCCCGGGGNNNNNNNNSSSSSSIIIIIIIIGGGGSSSSSSQQQQQQQQQFFFFFFFFFFFWWWWWWWWWWWWWWQQQQQQQQQQQQQQQQQQLLLLLLLLCCCCCCLLLLLLLLEEEEEEEEEHHHHHHHHHHGGGGIIIIIIIISSSSSSQQQQQQQQQDDDDDDDDGGGGTTTTTTTIIIIIIIIEEEEEEEEEDDDDDDDDFFFFFFFFFFFAAAAATTTTTTTEEEEEEEEEGGGGGGGGDDDDDDDDRRRRRRRRRRRKKKKKKKKKDDDDDDDDVVVVVVVFFFFFFFFFFFFFFFFFFFFFFYYYYYYYYYYYYQQQQQQQQQSSSSSSDDDDDDDDDDDDDDDDTTTTTTTRRRRRRRRRRRYYYYYYYYYYYYIIIIIIIIPPPPPPPRRRRRRRRRRRSSSSSSIIIIIIIILLLLLLLLIIIIIIIIDDDDDDDDLLLLLLLLEEEEEEEEEPPPPPPPRRRRRRRRRRRVVVVVVVIIIIIIIINNNNNNNNTTTTTTTIIIIIIIIQQQQQQQQQTTTTTTTGGGGPPPPPPPYYYYYYYYYYYYRRRRRRRRRRRNNNNNNNNIIIIIIIIYYYYYYYYYYYYNNNNNNNNPPPPPPPEEEEEEEEENNNNNNNNFFFFFFFFFFFYYYYYYYYYYYYVVVVVVVGGGGKKKKKKKKKSSSSSSGGGGLLLLLLLLGGGGAAAAAGGGGNNNNNNNNNNNNNNNNWWWWWWWWWWWWWWGGGGDDDDDDDDGGGGYYYYYYYYYYYYQQQQQQQQQTTTTTTTGGGGEEEEEEEEEQQQQQQQQQVVVVVVVHHHHHHHHHHEEEEEEEEEEEEEEEEEEIIIIIIIIMMMMMMMMEEEEEEEEEMMMMMMMMIIIIIIIIEEEEEEEEERRRRRRRRRRREEEEEEEEEAAAAADDDDDDDDGGGGSSSSSSDDDDDDDDSSSSSSLLLLLLLLEEEEEEEEEGGGGFFFFFFFFFFFMMMMMMMMMMMMMMMMLLLLLLLLHHHHHHHHHHSSSSSSIIIIIIIIAAAAAGGGGGGGGTTTTTTTGGGGSSSSSSGGGGLLLLLLLLGGGGSSSSSSFFFFFFFFFFFLLLLLLLLLLLLLLLLEEEEEEEEERRRRRRRRRRRLLLLLLLLNNNNNNNNDDDDDDDDRRRRRRRRRRRFFFFFFFFFFFPPPPPPPKKKKKKKKKKKKKKKKKKIIIIIIIIIIIIIIIIQQQQQQQQQTTTTTTTYYYYYYYYYYYYSSSSSSVVVVVVVFFFFFFFFFFFPPPPPPPDDDDDDDDTTTTTTTTTTTTTTSSSSSSAAAAAGGGGDDDDDDDDVVVVVVVVVVVVVVVVVVVVVHHHHHHHHHHPPPPPPPYYYYYYYYYYYYNNNNNNNNSSSSSSLLLLLLLLLLLLLLLLAAAAAMMMMMMMMRRRRRRRRRRRRRRRRRRRRRRLLLLLLLLTTTTTTTQQQQQQQQQNNNNNNNNAAAAADDDDDDDDSSSSSSVVVVVVVVVVVVVVVVVVVVVLLLLLLLLDDDDDDDDNNNNNNNNGGGGAAAAALLLLLLLLSSSSSSHHHHHHHHHHIIIIIIIIAAAAAAAAAADDDDDDDDRRRRRRRRRRRLLLLLLLLHHHHHHHHHHVVVVVVVQQQQQQQQQEEEEEEEEEPPPPPPPSSSSSSFFFFFFFFFFFQQQQQQQQQQQQQQQQQQTTTTTTTNNNNNNNNQQQQQQQQQLLLLLLLLVVVVVVVSSSSSSTTTTTTTVVVVVVVMMMMMMMMSSSSSSAAAAASSSSSSTTTTTTTTTTTTTTTTTTTTTLLLLLLLLRRRRRRRRRRRYYYYYYYYYYYYPPPPPPPGGGGYYYYYYYYYYYYMMMMMMMMHHHHHHHHHHNNNNNNNNDDDDDDDDLLLLLLLLVVVVVVVSSSSSSIIIIIIIILLLLLLLLAAAAASSSSSSLLLLLLLLIIIIIIIIPPPPPPPTTTTTTTPPPPPPPRRRRRRRRRRRCCCCCCHHHHHHHHHHFFFFFFFFFFFLLLLLLLLMMMMMMMMTTTTTTTSSSSSSYYYYYYYYYYYYTTTTTTTPPPPPPPFFFFFFFFFFFTTTTTTTGGGGDDDDDDDDQQQQQQQQQVVVVVVVEEEEEEEEEQQQQQQQQQAAAAAKKKKKKKKKTTTTTTTVVVVVVVRRRRRRRRRRRKKKKKKKKKTTTTTTTTTTTTTTVVVVVVVLLLLLLLLDDDDDDDDVVVVVVVMMMMMMMMRRRRRRRRRRRRRRRRRRRRRRLLLLLLLLLLLLLLLLQQQQQQQQQPPPPPPPKKKKKKKKKNNNNNNNNRRRRRRRRRRRMMMMMMMMVVVVVVVSSSSSSTTTTTTTVVVVVVVPPPPPPPGGGGKKKKKKKKKKKKKKKKKKSSSSSSCCCCCCYYYYYYYYYYYYIIIIIIIISSSSSSIIIIIIIILLLLLLLLNNNNNNNNVVVVVVVIIIIIIIIQQQQQQQQQGGGGDDDDDDDDVVVVVVVDDDDDDDDPPPPPPPTTTTTTTDDDDDDDDVVVVVVVHHHHHHHHHHKKKKKKKKKSSSSSSLLLLLLLLLLLLLLLLRRRRRRRRRRRIIIIIIIIRRRRRRRRRRREEEEEEEEERRRRRRRRRRRRRRRRRRRRRRLLLLLLLLAAAAATTTTTTTFFFFFFFFFFFIIIIIIIIPPPPPPPWWWWWWWWWWWWWWGGGGPPPPPPPAAAAASSSSSSIIIIIIIIQQQQQQQQQVVVVVVVAAAAALLLLLLLLTTTTTTTKKKKKKKKKRRRRRRRRRRRSSSSSSPPPPPPPYYYYYYYYYYYYVVVVVVVTTTTTTTMMMMMMMMAAAAAHHHHHHHHHHRRRRRRRRRRRVVVVVVVSSSSSSGGGGLLLLLLLLMMMMMMMMLLLLLLLLAAAAANNNNNNNNHHHHHHHHHHTTTTTTTSSSSSSIIIIIIIIAAAAATTTTTTTLLLLLLLLFFFFFFFFFFFKKKKKKKKKRRRRRRRRRRRIIIIIIIIVVVVVVVRRRRRRRRRRRQQQQQQQQQYYYYYYYYYYYYDDDDDDDDGGGGMMMMMMMMRRRRRRRRRRRKKKKKKKKKRRRRRRRRRRRNNNNNNNNAAAAAFFFFFFFFFFFMMMMMMMMEEEEEEEEEAAAAAYYYYYYYYYYYYKKKKKKKKKKKKKKKKKKTTTTTTTAAAAAPPPPPPPFFFFFFFFFFFSSSSSSEEEEEEEEENNNNNNNNLLLLLLLLNNNNNNNNEEEEEEEEEFFFFFFFFFFFDDDDDDDDEEEEEEEEEAAAAARRRRRRRRRRREEEEEEEEEVVVVVVVVVVVVVVMMMMMMMMDDDDDDDDLLLLLLLLIIIIIIIIAAAAADDDDDDDDYYYYYYYYYYYYEEEEEEEEEAAAAAAAAAAEEEEEEEEEDDDDDDDDAAAAANNNNNNNNYYYYYYYYYYYYLLLLLLLLNNNNNNNNPPPPPPPEEEEEEEEELLLLLLLLGGGGEEEEEEEEENNNNNNNNAAAAASSSSSSAAAAADDDDDDDDTTTTTTTDDDDDDDDKKKKKKKKKRRRRRRRRRRRMMMMMMMMAAAAAA

SEQ ID NO: 283 - protein, 3742 aa, Physcomitrella patens
MMMMMMMMPPPPPPPRRRRRRRRRRREEEEEEEEEIIIIIIIIIIIIIIIITTTTTTTLLLLLLLLQQQQQQQQQVVVVVVVGGGGQQQQQQQQQCCCCCCGGGGNNNNNNNNQQQQQQQQQIIIIIIIIGGGGMMMMMMMMEEEEEEEEEFFFFFFFFFFFWWWWWWWWWWWWWWKKKKKKKKKQQQQQQQQQLLLLLLLLCCCCCCLLLLLLLLEEEEEEEEEHHHHHHHHHHGGGGIIIIIIIISSSSSSKKKKKKKKKDDDDDDDDGGGGIIIIIIIILLLLLLLLEEEEEEEEEDDDDDDDDFFFFFFFFFFFAAAAATTTTTTTQQQQQQQQQGGGGGGGGDDDDDDDDRRRRRRRRRRRKKKKKKKKKDDDDDDDDVVVVVVVFFFFFFFFFFFFFFFFFFFFFFYYYYYYYYYYYYQQQQQQQQQAAAAADDDDDDDDDDDDDDDDEEEEEEEEEHHHHHHHHHHYYYYYYYYYYYYIIIIIIIIPPPPPPPRRRRRRRRRRRAAAAALLLLLLLLLLLLLLLLIIIIIIIIDDDDDDDDLLLLLLLLEEEEEEEEEPPPPPPPRRRRRRRRRRRVVVVVVVIIIIIIIINNNNNNNNSSSSSSIIIIIIIIQQQQQQQQQNNNNNNNNSSSSSSEEEEEEEEEYYYYYYYYYYYYRRRRRRRRRRRNNNNNNNNLLLLLLLLYYYYYYYYYYYYNNNNNNNNHHHHHHHHHHEEEEEEEEENNNNNNNNVVVVVVVFFFFFFFFFFFVVVVVVVAAAAADDDDDDDDHHHHHHHHHHGGGGGGGGGGGGAAAAAGGGGNNNNNNNNNNNNNNNNWWWWWWWWWWWWWWAAAAASSSSSSGGGGYYYYYYYYYYYYHHHHHHHHHHQQQQQQQQQGGGGEEEEEEEEEQQQQQQQQQVVVVVVVEEEEEEEEEEEEEEEEEEDDDDDDDDIIIIIIIIMMMMMMMMDDDDDDDDMMMMMMMMIIIIIIIIDDDDDDDDRRRRRRRRRRREEEEEEEEEAAAAADDDDDDDDGGGGSSSSSSDDDDDDDDSSSSSSLLLLLLLLEEEEEEEEEGGGGFFFFFFFFFFFVVVVVVVLLLLLLLLCCCCCCHHHHHHHHHHSSSSSSIIIIIIIIAAAAAGGGGGGGGTTTTTTTGGGGSSSSSSGGGGMMMMMMMMGGGGSSSSSSYYYYYYYYYYYYLLLLLLLLLLLLLLLLEEEEEEEEEAAAAALLLLLLLLNNNNNNNNDDDDDDDDRRRRRRRRRRRYYYYYYYYYYYYSSSSSSKKKKKKKKKKKKKKKKKKLLLLLLLLVVVVVVVQQQQQQQQQTTTTTTTYYYYYYYYYYYYSSSSSSVVVVVVVFFFFFFFFFFFPPPPPPPNNNNNNNNQQQQQQQQQMMMMMMMMEEEEEEEEETTTTTTTSSSSSSDDDDDDDDVVVVVVVVVVVVVVVVVVVVVQQQQQQQQQPPPPPPPYYYYYYYYYYYYNNNNNNNNSSSSSSLLLLLLLLLLLLLLLLTTTTTTTLLLLLLLLKKKKKKKKKRRRRRRRRRRRLLLLLLLLTTTTTTTLLLLLLLLNNNNNNNNAAAAADDDDDDDDCCCCCCVVVVVVVVVVVVVVVVVVVVVLLLLLLLLDDDDDDDDNNNNNNNNTTTTTTTAAAAALLLLLLLLNNNNNNNNRRRRRRRRRRRIIIIIIIIAAAAAVVVVVVVDDDDDDDDRRRRRRRRRRRLLLLLLLLHHHHHHHHHHIIIIIIIIPPPPPPPNNNNNNNNPPPPPPPTTTTTTTFFFFFFFFFFFAAAAAQQQQQQQQQTTTTTTTNNNNNNNNSSSSSSLLLLLLLLVVVVVVVSSSSSSTTTTTTTVVVVVVVMMMMMMMMSSSSSSAAAAASSSSSSTTTTTTTTTTTTTTTTTTTTTLLLLLLLLRRRRRRRRRRRYYYYYYYYYYYYPPPPPPPGGGGYYYYYYYYYYYYMMMMMMMMNNNNNNNNNNNNNNNNDDDDDDDDLLLLLLLLVVVVVVVGGGGLLLLLLLLVVVVVVVAAAAASSSSSSLLLLLLLLIIIIIIIIPPPPPPPTTTTTTTPPPPPPPRRRRRRRRRRRCCCCCCHHHHHHHHHHFFFFFFFFFFFLLLLLLLLMMMMMMMMTTTTTTTGGGGYYYYYYYYYYYYTTTTTTTPPPPPPPLLLLLLLLTTTTTTTVVVVVVVEEEEEEEEERRRRRRRRRRRQQQQQQQQQAAAAANNNNNNNNAAAAAIIIIIIIIRRRRRRRRRRRKKKKKKKKKTTTTTTTTTTTTTTVVVVVVVLLLLLLLLDDDDDDDDVVVVVVVMMMMMMMMRRRRRRRRRRRRRRRRRRRRRRLLLLLLLLLLLLLLLLQQQQQQQQQAAAAAKKKKKKKKKNNNNNNNNIIIIIIIIMMMMMMMMVVVVVVVSSSSSSSSSSSSYYYYYYYYYYYYAAAAARRRRRRRRRRRTTTTTTTKKKKKKKKKEEEEEEEEEAAAAASSSSSSQQQQQQQQQAAAAAKKKKKKKKKYYYYYYYYYYYYIIIIIIIISSSSSSIIIIIIIILLLLLLLLNNNNNNNNIIIIIIIIIIIIIIIIQQQQQQQQQGGGGEEEEEEEEEVVVVVVVDDDDDDDDPPPPPPPTTTTTTTQQQQQQQQQVVVVVVVHHHHHHHHHHKKKKKKKKKSSSSSSLLLLLLLLQQQQQQQQQRRRRRRRRRRRIIIIIIIIRRRRRRRRRRREEEEEEEEERRRRRRRRRRRKKKKKKKKKLLLLLLLLAAAAANNNNNNNNFFFFFFFFFFFIIIIIIIIEEEEEEEEEWWWWWWWWWWWWWWGGGGPPPPPPPAAAAASSSSSSIIIIIIIIQQQQQQQQQVVVVVVVAAAAALLLLLLLLSSSSSSRRRRRRRRRRRKKKKKKKKKSSSSSSPPPPPPPYYYYYYYYYYYYVVVVVVVQQQQQQQQQTTTTTTTAAAAAHHHHHHHHHHRRRRRRRRRRRVVVVVVVSSSSSSGGGGLLLLLLLLMMMMMMMMLLLLLLLLAAAAASSSSSSHHHHHHHHHHTTTTTTTSSSSSSIIIIIIIIRRRRRRRRRRRHHHHHHHHHHLLLLLLLLFFFFFFFFFFFSSSSSSKKKKKKKKKCCCCCCIIIIIIIISSSSSSQQQQQQQQQYYYYYYYYYYYYEEEEEEEEEKKKKKKKKKLLLLLLLLRRRRRRRRRRRKKKKKKKKKKKKKKKKKKQQQQQQQQQAAAAAFFFFFFFFFFFLLLLLLLLDDDDDDDDNNNNNNNNYYYYYYYYYYYYRRRRRRRRRRRKKKKKKKKKFFFFFFFFFFFPPPPPPPMMMMMMMMFFFFFFFFFFFAAAAADDDDDDDDNNNNNNNNDDDDDDDDLLLLLLLLSSSSSSEEEEEEEEEFFFFFFFFFFFDDDDDDDDEEEEEEEEESSSSSSRRRRRRRRRRREEEEEEEEEIIIIIIIIVVVVVVVQQQQQQQQQNNNNNNNNLLLLLLLLVVVVVVVDDDDDDDDEEEEEEEEEYYYYYYYYYYYYKKKKKKKKKAAAAACCCCCCEEEEEEEEESSSSSSAAAAADDDDDDDDYYYYYYYYYYYYIIIIIIIIKKKKKKKKKWWWWWWWWWWWWWWGGGGMMMMMMMMEEEEEEEEEDDDDDDDDRRRRRRRRRRRGGGGKKKKKKKKKQQQQQQQQQVVVVVVVSSSSSSGGGGEEEEEEEEEGGGGNNNNNNNNTTTTTTTSSSSSSGGGGTTTTTTTVVVVVVVDDDDDDDDSSSSSSRRRRRRRRRRRVVVVVVVGGGGAAAAASSSSSSS

SEQ ID NO: 284 - protein, 3617 aa, Plasmodium falciparum
MMMMMMMMPPPPPPPRRRRRRRRRRREEEEEEEEEIIIIIIIIIIIIIIIITTTTTTTLLLLLLLLQQQQQQQQQCCCCCCGGGGQQQQQQQQQCCCCCCGGGGNNNNNNNNQQQQQQQQQIIIIIIIIGGGGVVVVVVVEEEEEEEEEFFFFFFFFFFFWWWWWWWWWWWWWWKKKKKKKKKQQQQQQQQQLLLLLLLLCCCCCCNNNNNNNNEEEEEEEEEHHHHHHHHHHNNNNNNNNIIIIIIIIDDDDDDDDQQQQQQQQQEEEEEEEEEGGGGIIIIIIIILLLLLLLLKKKKKKKKKNNNNNNNNNNNNNNNNNNNNNNNNFFFFFFFFFFFLLLLLLLLNNNNNNNNEEEEEEEEEDDDDDDDDRRRRRRRRRRRKKKKKKKKKDDDDDDDDIIIIIIIIFFFFFFFFFFFFFFFFFFFFFFYYYYYYYYYYYYQQQQQQQQQAAAAADDDDDDDDDDDDDDDDEEEEEEEEEHHHHHHHHHHFFFFFFFFFFFIIIIIIIIPPPPPPPGGGGAAAAALLLLLLLLLLLLLLLLFFFFFFFFFFFDDDDDDDDLLLLLLLLEEEEEEEEEPPPPPPPRRRRRRRRRRRVVVVVVVIIIIIIIINNNNNNNNSSSSSSIIIIIIIIQQQQQQQQQTTTTTTTSSSSSSEEEEEEEEEYYYYYYYYYYYYRRRRRRRRRRRNNNNNNNNLLLLLLLLYYYYYYYYYYYYNNNNNNNNPPPPPPPEEEEEEEEENNNNNNNNMMMMMMMMFFFFFFFFFFFIIIIIIIISSSSSSKKKKKKKKKEEEEEEEEEGGGGGGGGGGGGAAAAAGGGGNNNNNNNNNNNNNNNNWWWWWWWWWWWWWWGGGGCCCCCCGGGGYYYYYYYYYYYYSSSSSSQQQQQQQQQGGGGHHHHHHHHHHKKKKKKKKKVVVVVVVEEEEEEEEEEEEEEEEEEEEEEEEEEEIIIIIIIIIIIIIIIIDDDDDDDDMMMMMMMMIIIIIIIIDDDDDDDDRRRRRRRRRRREEEEEEEEEVVVVVVVDDDDDDDDNNNNNNNNSSSSSSDDDDDDDDNNNNNNNNLLLLLLLLEEEEEEEEEGGGGFFFFFFFFFFFIIIIIIIILLLLLLLLSSSSSSHHHHHHHHHHSSSSSSIIIIIIIIAAAAAGGGGGGGGTTTTTTTGGGGSSSSSSGGGGMMMMMMMMGGGGSSSSSSYYYYYYYYYYYYLLLLLLLLLLLLLLLLEEEEEEEEELLLLLLLLLLLLLLLLNNNNNNNNDDDDDDDDNNNNNNNNYYYYYYYYYYYYSSSSSSKKKKKKKKKKKKKKKKKKMMMMMMMMIIIIIIIIQQQQQQQQQTTTTTTTFFFFFFFFFFFSSSSSSVVVVVVVFFFFFFFFFFFPPPPPPPLLLLLLLLLLLLLLLLTTTTTTTNNNNNNNNEEEEEEEEESSSSSSSSSSSSDDDDDDDDVVVVVVVVVVVVVVVVVVVVVQQQQQQQQQPPPPPPPYYYYYYYYYYYYNNNNNNNNSSSSSSIIIIIIIILLLLLLLLTTTTTTTLLLLLLLLKKKKKKKKKRRRRRRRRRRRLLLLLLLLIIIIIIIILLLLLLLLSSSSSSTTTTTTTDDDDDDDDSSSSSSVVVVVVVVVVVVVVVVVVVVVIIIIIIIIDDDDDDDDNNNNNNNNTTTTTTTSSSSSSLLLLLLLLNNNNNNNNRRRRRRRRRRRIIIIIIIIFFFFFFFFFFFVVVVVVVEEEEEEEEERRRRRRRRRRRLLLLLLLLKKKKKKKKKLLLLLLLLNNNNNNNNNNNNNNNNPPPPPPPTTTTTTTFFFFFFFFFFFQQQQQQQQQQQQQQQQQQTTTTTTTNNNNNNNNTTTTTTTIIIIIIIIIIIIIIIISSSSSSNNNNNNNNVVVVVVVMMMMMMMMSSSSSSAAAAASSSSSSTTTTTTTTTTTTTTTTTTTTTLLLLLLLLRRRRRRRRRRRYYYYYYYYYYYYPPPPPPPGGGGSSSSSSMMMMMMMMNNNNNNNNNNNNNNNNDDDDDDDDMMMMMMMMIIIIIIIISSSSSSLLLLLLLLIIIIIIIISSSSSSSSSSSSLLLLLLLLIIIIIIIIIIIIIIIINNNNNNNNPPPPPPPKKKKKKKKKCCCCCCHHHHHHHHHHFFFFFFFFFFFLLLLLLLLIIIIIIIITTTTTTTSSSSSSYYYYYYYYYYYYTTTTTTTPPPPPPPIIIIIIIITTTTTTTIIIIIIIIDDDDDDDDKKKKKKKKKHHHHHHHHHHIIIIIIIISSSSSSNNNNNNNNVVVVVVVQQQQQQQQQKKKKKKKKKTTTTTTTTTTTTTTVVVVVVVLLLLLLLLDDDDDDDDVVVVVVVMMMMMMMMKKKKKKKKKRRRRRRRRRRRLLLLLLLLLLLLLLLLHHHHHHHHHHTTTTTTTKKKKKKKKKNNNNNNNNIIIIIIIIMMMMMMMMVVVVVVVSSSSSSAAAAAPPPPPPPVVVVVVVRRRRRRRRRRRRRRRRRRRRRRGGGGMMMMMMMMYYYYYYYYYYYYIIIIIIIISSSSSSIIIIIIIILLLLLLLLNNNNNNNNIIIIIIIIIIIIIIIIRRRRRRRRRRRGGGGEEEEEEEEETTTTTTTDDDDDDDDPPPPPPPTTTTTTTQQQQQQQQQVVVVVVVHHHHHHHHHHKKKKKKKKKGGGGLLLLLLLLQQQQQQQQQRRRRRRRRRRRIIIIIIIIRRRRRRRRRRRDDDDDDDDRRRRRRRRRRRKKKKKKKKKLLLLLLLLVVVVVVVNNNNNNNNFFFFFFFFFFFIIIIIIIIKKKKKKKKKWWWWWWWWWWWWWWNNNNNNNNPPPPPPPAAAAASSSSSSIIIIIIIIQQQQQQQQQVVVVVVVTTTTTTTLLLLLLLLAAAAAKKKKKKKKKQQQQQQQQQSSSSSSPPPPPPPHHHHHHHHHHVVVVVVVVVVVVVVSSSSSSQQQQQQQQQHHHHHHHHHHKKKKKKKKKVVVVVVVCCCCCCGGGGLLLLLLLLMMMMMMMMMMMMMMMMAAAAANNNNNNNNHHHHHHHHHHTTTTTTTSSSSSSIIIIIIIISSSSSSTTTTTTTLLLLLLLLFFFFFFFFFFFEEEEEEEEERRRRRRRRRRRCCCCCCVVVVVVVTTTTTTTQQQQQQQQQFFFFFFFFFFFDDDDDDDDRRRRRRRRRRRLLLLLLLLYYYYYYYYYYYYKKKKKKKKKRRRRRRRRRRRRRRRRRRRRRRAAAAAFFFFFFFFFFFLLLLLLLLEEEEEEEEENNNNNNNNYYYYYYYYYYYYKKKKKKKKKKKKKKKKKKEEEEEEEEESSSSSSMMMMMMMMFFFFFFFFFFFSSSSSSSSSSSSAAAAADDDDDDDDGGGGQQQQQQQQQGGGGNNNNNNNNFFFFFFFFFFFEEEEEEEEEEEEEEEEEEMMMMMMMMEEEEEEEEESSSSSSSSSSSSKKKKKKKKKEEEEEEEEEIIIIIIIITTTTTTTQQQQQQQQQNNNNNNNNLLLLLLLLIIIIIIIIDDDDDDDDEEEEEEEEEYYYYYYYYYYYYKKKKKKKKKSSSSSSAAAAAEEEEEEEEERRRRRRRRRRRDDDDDDDDDDDDDDDDYYYYYYYYYYYYFFFFFFFFFFFTTTTTTTNNNNNNNNTTTTTTTYYYYYYYYYYYYIIIIIIIII

SEQ ID NO: 285 - protein, 3769 aa, Reticulomyxa filosa
MMMMMMMMPPPPPPPRRRRRRRRRRREEEEEEEEEIIIIIIIIIIIIIIIITTTTTTTLLLLLLLLQQQQQQQQQVVVVVVVGGGGQQQQQQQQQCCCCCCGGGGNNNNNNNNQQQQQQQQQIIIIIIIIGGGGTTTTTTTEEEEEEEEEFFFFFFFFFFFWWWWWWWWWWWWWWGGGGRRRRRRRRRRRLLLLLLLLIIIIIIIIAAAAAEEEEEEEEEHHHHHHHHHHGGGGIIIIIIIIGGGGPPPPPPPDDDDDDDDGGGGIIIIIIIIVVVVVVVKKKKKKKKKEEEEEEEEEFFFFFFFFFFFAAAAATTTTTTTEEEEEEEEEGGGGTTTTTTTDDDDDDDDRRRRRRRRRRRKKKKKKKKKDDDDDDDDVVVVVVVFFFFFFFFFFFFFFFFFFFFFFYYYYYYYYYYYYQQQQQQQQQAAAAADDDDDDDDDDDDDDDDQQQQQQQQQHHHHHHHHHHYYYYYYYYYYYYIIIIIIIIPPPPPPPRRRRRRRRRRRAAAAALLLLLLLLLLLLLLLLIIIIIIIIDDDDDDDDLLLLLLLLEEEEEEEEEPPPPPPPRRRRRRRRRRRVVVVVVVIIIIIIIINNNNNNNNSSSSSSLLLLLLLLQQQQQQQQQEEEEEEEEESSSSSSEEEEEEEEEFFFFFFFFFFFKKKKKKKKKNNNNNNNNLLLLLLLLWWWWWWWWWWWWWWNNNNNNNNPPPPPPPEEEEEEEEENNNNNNNNVVVVVVVYYYYYYYYYYYYIIIIIIIIDDDDDDDDSSSSSSQQQQQQQQQGGGGGGGGGGGGAAAAAGGGGNNNNNNNNNNNNNNNNWWWWWWWWWWWWWWAAAAAVVVVVVVGGGGYYYYYYYYYYYYTTTTTTTHHHHHHHHHHAAAAATTTTTTTEEEEEEEEEKKKKKKKKKYYYYYYYYYYYYEEEEEEEEEHHHHHHHHHHIIIIIIIIMMMMMMMMDDDDDDDDMMMMMMMMIIIIIIIIDDDDDDDDRRRRRRRRRRREEEEEEEEEDDDDDDDDNNNNNNNNSSSSSSDDDDDDDDSSSSSSLLLLLLLLEEEEEEEEEGGGGFFFFFFFFFFFVVVVVVVLLLLLLLLTTTTTTTHHHHHHHHHHSSSSSSIIIIIIIIAAAAAGGGGGGGGTTTTTTTGGGGSSSSSSGGGGFFFFFFFFFFFGGGGSSSSSSHHHHHHHHHHMMMMMMMMLLLLLLLLEEEEEEEEEQQQQQQQQQLLLLLLLLTTTTTTTDDDDDDDDRRRRRRRRRRRYYYYYYYYYYYYPPPPPPPKKKKKKKKKKKKKKKKKKIIIIIIIIIIIIIIIIQQQQQQQQQTTTTTTTYYYYYYYYYYYYSSSSSSVVVVVVVFFFFFFFFFFFPPPPPPPNNNNNNNNDDDDDDDDSSSSSSEEEEEEEEERRRRRRRRRRRSSSSSSSSSSSSVVVVVVVVVVVVVVVVVVVVVHHHHHHHHHHPPPPPPPYYYYYYYYYYYYNNNNNNNNSSSSSSVVVVVVVLLLLLLLLAAAAALLLLLLLLKKKKKKKKKRRRRRRRRRRRLLLLLLLLIIIIIIIILLLLLLLLNNNNNNNNAAAAADDDDDDDDAAAAAVVVVVVVVVVVVVVVVVVVVVIIIIIIIIDDDDDDDDNNNNNNNNTTTTTTTSSSSSSLLLLLLLLHHHHHHHHHHRRRRRRRRRRRIIIIIIIIAAAAADDDDDDDDEEEEEEEEERRRRRRRRRRRLLLLLLLLQQQQQQQQQLLLLLLLLDDDDDDDDFFFFFFFFFFFAAAAASSSSSSFFFFFFFFFFFKKKKKKKKKEEEEEEEEETTTTTTTNNNNNNNNSSSSSSIIIIIIIIIIIIIIIISSSSSSTTTTTTTVVVVVVVMMMMMMMMAAAAAAAAAASSSSSSTTTTTTTTTTTTTTTTTTTTTLLLLLLLLRRRRRRRRRRRYYYYYYYYYYYYPPPPPPPGGGGYYYYYYYYYYYYMMMMMMMMNNNNNNNNNNNNNNNNDDDDDDDDLLLLLLLLVVVVVVVGGGGLLLLLLLLIIIIIIIIAAAAASSSSSSLLLLLLLLVVVVVVVPPPPPPPTTTTTTTPPPPPPPRRRRRRRRRRRAAAAAHHHHHHHHHHFFFFFFFFFFFLLLLLLLLMMMMMMMMTTTTTTTSSSSSSFFFFFFFFFFFTTTTTTTPPPPPPPLLLLLLLLVVVVVVVIIIIIIIIKKKKKKKKKGGGGAAAAAQQQQQQQQQRRRRRRRRRRRRRRRRRRRRRRIIIIIIIIQQQQQQQQQKKKKKKKKKTTTTTTTSSSSSSVVVVVVVLLLLLLLLDDDDDDDDVVVVVVVMMMMMMMMRRRRRRRRRRRRRRRRRRRRRRLLLLLLLLLLLLLLLLQQQQQQQQQPPPPPPPKKKKKKKKKNNNNNNNNIIIIIIIIMMMMMMMMVVVVVVVSSSSSSCCCCCCGGGGTTTTTTTKKKKKKKKKKKKKKKKKKGGGGVVVVVVVYYYYYYYYYYYYVVVVVVVSSSSSSIIIIIIIILLLLLLLLDDDDDDDDIIIIIIIIIIIIIIIIRRRRRRRRRRRGGGGDDDDDDDDVVVVVVVDDDDDDDDPPPPPPPTTTTTTTDDDDDDDDIIIIIIIIHHHHHHHHHHKKKKKKKKKSSSSSSLLLLLLLLQQQQQQQQQRRRRRRRRRRRIIIIIIIIRRRRRRRRRRREEEEEEEEEKKKKKKKKKKKKKKKKKKIIIIIIIIVVVVVVVNNNNNNNNFFFFFFFFFFFIIIIIIIIPPPPPPPWWWWWWWWWWWWWWGGGGPPPPPPPAAAAASSSSSSIIIIIIIIQQQQQQQQQVVVVVVVAAAAALLLLLLLLSSSSSSKKKKKKKKKQQQQQQQQQSSSSSSPPPPPPPYYYYYYYYYYYYAAAAANNNNNNNNVVVVVVVPPPPPPPYYYYYYYYYYYYRRRRRRRRRRRVVVVVVVSSSSSSGGGGCCCCCCMMMMMMMMMMMMMMMMAAAAANNNNNNNNHHHHHHHHHHSSSSSSNNNNNNNNLLLLLLLLGGGGNNNNNNNNLLLLLLLLFFFFFFFFFFFAAAAARRRRRRRRRRRIIIIIIIIIIIIIIIIRRRRRRRRRRRTTTTTTTYYYYYYYYYYYYDDDDDDDDIIIIIIIILLLLLLLLRRRRRRRRRRRKKKKKKKKKRRRRRRRRRRRNNNNNNNNAAAAAFFFFFFFFFFFLLLLLLLLNNNNNNNNVVVVVVVYYYYYYYYYYYYKKKKKKKKKEEEEEEEEETTTTTTTPPPPPPPVVVVVVVFFFFFFFFFFFSSSSSSEEEEEEEEENNNNNNNNLLLLLLLLDDDDDDDDEEEEEEEEEFFFFFFFFFFFEEEEEEEEEDDDDDDDDAAAAAKKKKKKKKKEEEEEEEEETTTTTTTIIIIIIIITTTTTTTNNNNNNNNLLLLLLLLIIIIIIIIEEEEEEEEEEEEEEEEEEYYYYYYYYYYYYKKKKKKKKKAAAAAIIIIIIIIQQQQQQQQQTTTTTTTSSSSSSDDDDDDDDYYYYYYYYYYYYIIIIIIIINNNNNNNNWWWWWWWWWWWWWWGGGGMMMMMMMMKKKKKKKKKQQQQQQQQQQQQQQQQQQQQQQQQQQQSSSSSSQQQQQQQQQIIIIIIIISSSSSSQQQQQQQQQKKKKKKKKKEEEEEEEEESSSSSSSSSSSSSSSSSSLLLLLLLLAAAAANNNNNNNNEEEEEEEEENNNNNNNNGGGGNNNNNNNNGGGGAAAAANNNNNNNNNNNNNNNNKKKKKKKKKPPPPPPPGGGGKKKKKKKKKSSSSSSAAAAAMMMMMMMMAAAAALLLLLLLLL

SEQ ID NO: 286 - protein, 3531 aa, Schizosaccharomyces japonicus
MMMMMMMMGGGGRRRRRRRRRRREEEEEEEEEIIIIIIIIIIIIIIIITTTTTTTLLLLLLLLQQQQQQQQQAAAAAGGGGQQQQQQQQQCCCCCCGGGGNNNNNNNNQQQQQQQQQVVVVVVVGGGGSSSSSSQQQQQQQQQFFFFFFFFFFFWWWWWWWWWWWWWWQQQQQQQQQQQQQQQQQQLLLLLLLLCCCCCCLLLLLLLLEEEEEEEEEHHHHHHHHHHGGGGIIIIIIIICCCCCCPPPPPPPDDDDDDDDGGGGTTTTTTTLLLLLLLLEEEEEEEEEDDDDDDDDFFFFFFFFFFFAAAAATTTTTTTEEEEEEEEEGGGGLLLLLLLLDDDDDDDDRRRRRRRRRRRKKKKKKKKKDDDDDDDDVVVVVVVFFFFFFFFFFFFFFFFFFFFFFYYYYYYYYYYYYQQQQQQQQQSSSSSSDDDDDDDDDDDDDDDDTTTTTTTRRRRRRRRRRRYYYYYYYYYYYYIIIIIIIIPPPPPPPRRRRRRRRRRRAAAAAIIIIIIIILLLLLLLLLLLLLLLLDDDDDDDDLLLLLLLLEEEEEEEEEPPPPPPPRRRRRRRRRRRVVVVVVVVVVVVVVNNNNNNNNNNNNNNNNIIIIIIIILLLLLLLLSSSSSSDDDDDDDDTTTTTTTYYYYYYYYYYYYGGGGSSSSSSLLLLLLLLYYYYYYYYYYYYNNNNNNNNPPPPPPPEEEEEEEEENNNNNNNNIIIIIIIIFFFFFFFFFFFVVVVVVVAAAAATTTTTTTDDDDDDDDGGGGGGGGGGGGAAAAAGGGGNNNNNNNNNNNNNNNNWWWWWWWWWWWWWWAAAAAHHHHHHHHHHGGGGYYYYYYYYYYYYAAAAAHHHHHHHHHHAAAAAEEEEEEEEEKKKKKKKKKIIIIIIIIFFFFFFFFFFFEEEEEEEEEDDDDDDDDIIIIIIIIVVVVVVVDDDDDDDDMMMMMMMMIIIIIIIIDDDDDDDDRRRRRRRRRRREEEEEEEEEAAAAAEEEEEEEEEGGGGSSSSSSDDDDDDDDSSSSSSLLLLLLLLEEEEEEEEEGGGGFFFFFFFFFFFSSSSSSLLLLLLLLLLLLLLLLHHHHHHHHHHSSSSSSIIIIIIIIAAAAAGGGGGGGGTTTTTTTGGGGSSSSSSGGGGLLLLLLLLGGGGSSSSSSYYYYYYYYYYYYLLLLLLLLLLLLLLLLEEEEEEEEERRRRRRRRRRRLLLLLLLLNNNNNNNNDDDDDDDDRRRRRRRRRRRFFFFFFFFFFFPPPPPPPKKKKKKKKKKKKKKKKKKIIIIIIIIVVVVVVVQQQQQQQQQTTTTTTTYYYYYYYYYYYYSSSSSSVVVVVVVFFFFFFFFFFFPPPPPPPNNNNNNNNNNNNNNNNRRRRRRRRRRRSSSSSSVVVVVVVSSSSSSDDDDDDDDVVVVVVVVVVVVVVVVVVVVVQQQQQQQQQPPPPPPPYYYYYYYYYYYYNNNNNNNNSSSSSSLLLLLLLLLLLLLLLLTTTTTTTLLLLLLLLKKKKKKKKKRRRRRRRRRRRLLLLLLLLTTTTTTTLLLLLLLLNNNNNNNNAAAAADDDDDDDDAAAAAVVVVVVVVVVVVVVVVVVVVVLLLLLLLLDDDDDDDDNNNNNNNNAAAAAAAAAALLLLLLLLAAAAAHHHHHHHHHHIIIIIIIIAAAAAAAAAADDDDDDDDRRRRRRRRRRRLLLLLLLLHHHHHHHHHHIIIIIIIIQQQQQQQQQNNNNNNNNPPPPPPPTTTTTTTFFFFFFFFFFFHHHHHHHHHHQQQQQQQQQQQQQQQQQQNNNNNNNNQQQQQQQQQLLLLLLLLVVVVVVVSSSSSSTTTTTTTVVVVVVVMMMMMMMMSSSSSSAAAAASSSSSSTTTTTTTTTTTTTTTTTTTTTLLLLLLLLRRRRRRRRRRRYYYYYYYYYYYYPPPPPPPGGGGYYYYYYYYYYYYMMMMMMMMNNNNNNNNNNNNNNNNDDDDDDDDLLLLLLLLVVVVVVVSSSSSSIIIIIIIIIIIIIIIIAAAAASSSSSSLLLLLLLLIIIIIIIIPPPPPPPTTTTTTTPPPPPPPRRRRRRRRRRRCCCCCCHHHHHHHHHHFFFFFFFFFFFLLLLLLLLSSSSSSTTTTTTTSSSSSSYYYYYYYYYYYYTTTTTTTPPPPPPPFFFFFFFFFFFTTTTTTTSSSSSSQQQQQQQQQQQQQQQQQQVVVVVVVEEEEEEEEEDDDDDDDDAAAAARRRRRRRRRRRTTTTTTTIIIIIIIIRRRRRRRRRRRKKKKKKKKKTTTTTTTTTTTTTTVVVVVVVLLLLLLLLDDDDDDDDVVVVVVVMMMMMMMMRRRRRRRRRRRRRRRRRRRRRRLLLLLLLLLLLLLLLLQQQQQQQQQPPPPPPPKKKKKKKKKNNNNNNNNRRRRRRRRRRRMMMMMMMMVVVVVVVSSSSSSVVVVVVVNNNNNNNNPPPPPPPGGGGKKKKKKKKKQQQQQQQQQSSSSSSCCCCCCFFFFFFFFFFFIIIIIIIISSSSSSIIIIIIIILLLLLLLLNNNNNNNNIIIIIIIIIIIIIIIIQQQQQQQQQGGGGEEEEEEEEEAAAAADDDDDDDDPPPPPPPNNNNNNNNDDDDDDDDVVVVVVVHHHHHHHHHHKKKKKKKKKSSSSSSLLLLLLLLLLLLLLLLRRRRRRRRRRRIIIIIIIIRRRRRRRRRRREEEEEEEEERRRRRRRRRRRKKKKKKKKKLLLLLLLLAAAAATTTTTTTFFFFFFFFFFFIIIIIIIIPPPPPPPWWWWWWWWWWWWWWGGGGPPPPPPPAAAAASSSSSSIIIIIIIIQQQQQQQQQVVVVVVVAAAAALLLLLLLLSSSSSSKKKKKKKKKKKKKKKKKKSSSSSSPPPPPPPYYYYYYYYYYYYIIIIIIIIKKKKKKKKKTTTTTTTNNNNNNNNHHHHHHHHHHRRRRRRRRRRRVVVVVVVSSSSSSGGGGLLLLLLLLMMMMMMMMLLLLLLLLAAAAANNNNNNNNHHHHHHHHHHTTTTTTTSSSSSSIIIIIIIIAAAAASSSSSSLLLLLLLLFFFFFFFFFFFKKKKKKKKKRRRRRRRRRRRTTTTTTTLLLLLLLLDDDDDDDDQQQQQQQQQYYYYYYYYYYYYDDDDDDDDRRRRRRRRRRRLLLLLLLLRRRRRRRRRRRKKKKKKKKKRRRRRRRRRRRNNNNNNNNAAAAAFFFFFFFFFFFLLLLLLLLDDDDDDDDQQQQQQQQQYYYYYYYYYYYYRRRRRRRRRRRKKKKKKKKKEEEEEEEEESSSSSSIIIIIIIIFFFFFFFFFFFEEEEEEEEENNNNNNNNSSSSSSLLLLLLLLDDDDDDDDEEEEEEEEEFFFFFFFFFFFDDDDDDDDNNNNNNNNSSSSSSRRRRRRRRRRREEEEEEEEEVVVVVVVVVVVVVVAAAAADDDDDDDDLLLLLLLLIIIIIIIIRRRRRRRRRRREEEEEEEEEYYYYYYYYYYYYEEEEEEEEEAAAAACCCCCCEEEEEEEEEQQQQQQQQQPPPPPPPEEEEEEEEEYYYYYYYYYYYYLLLLLLLLSSSSSSMMMMMMMMM

SEQ ID NO: 287 - protein, 3518 aa, Schizosaccharomyces pombe
MMMMMMMMGGGGRRRRRRRRRRREEEEEEEEEIIIIIIIIIIIIIIIITTTTTTTLLLLLLLLQQQQQQQQQAAAAAGGGGQQQQQQQQQCCCCCCGGGGNNNNNNNNQQQQQQQQQIIIIIIIIGGGGSSSSSSQQQQQQQQQFFFFFFFFFFFWWWWWWWWWWWWWWQQQQQQQQQQQQQQQQQQLLLLLLLLCCCCCCLLLLLLLLEEEEEEEEEHHHHHHHHHHGGGGIIIIIIIIGGGGPPPPPPPDDDDDDDDGGGGTTTTTTTLLLLLLLLEEEEEEEEESSSSSSFFFFFFFFFFFAAAAATTTTTTTEEEEEEEEEGGGGVVVVVVVDDDDDDDDRRRRRRRRRRRKKKKKKKKKDDDDDDDDVVVVVVVFFFFFFFFFFFFFFFFFFFFFFYYYYYYYYYYYYQQQQQQQQQSSSSSSDDDDDDDDDDDDDDDDTTTTTTTRRRRRRRRRRRYYYYYYYYYYYYIIIIIIIIPPPPPPPRRRRRRRRRRRAAAAAIIIIIIIILLLLLLLLIIIIIIIIDDDDDDDDLLLLLLLLEEEEEEEEEPPPPPPPRRRRRRRRRRRVVVVVVVVVVVVVVNNNNNNNNNNNNNNNNIIIIIIIILLLLLLLLSSSSSSDDDDDDDDTTTTTTTYYYYYYYYYYYYGGGGSSSSSSLLLLLLLLYYYYYYYYYYYYNNNNNNNNPPPPPPPEEEEEEEEENNNNNNNNIIIIIIIILLLLLLLLIIIIIIIITTTTTTTKKKKKKKKKNNNNNNNNGGGGGGGGGGGGAAAAAGGGGNNNNNNNNNNNNNNNNWWWWWWWWWWWWWWAAAAANNNNNNNNGGGGYYYYYYYYYYYYSSSSSSHHHHHHHHHHAAAAAEEEEEEEEERRRRRRRRRRRIIIIIIIIFFFFFFFFFFFEEEEEEEEEDDDDDDDDIIIIIIIIMMMMMMMMDDDDDDDDMMMMMMMMIIIIIIIIDDDDDDDDRRRRRRRRRRREEEEEEEEEAAAAADDDDDDDDGGGGSSSSSSDDDDDDDDSSSSSSLLLLLLLLEEEEEEEEEGGGGFFFFFFFFFFFSSSSSSLLLLLLLLLLLLLLLLHHHHHHHHHHSSSSSSIIIIIIIIAAAAAGGGGGGGGTTTTTTTGGGGSSSSSSGGGGLLLLLLLLGGGGSSSSSSFFFFFFFFFFFLLLLLLLLLLLLLLLLEEEEEEEEERRRRRRRRRRRLLLLLLLLNNNNNNNNDDDDDDDDRRRRRRRRRRRYYYYYYYYYYYYPPPPPPPKKKKKKKKKKKKKKKKKKIIIIIIIIIIIIIIIIQQQQQQQQQTTTTTTTYYYYYYYYYYYYSSSSSSVVVVVVVFFFFFFFFFFFPPPPPPPNNNNNNNNSSSSSSQQQQQQQQQSSSSSSVVVVVVVSSSSSSDDDDDDDDVVVVVVVVVVVVVVVVVVVVVQQQQQQQQQPPPPPPPYYYYYYYYYYYYNNNNNNNNSSSSSSLLLLLLLLLLLLLLLLAAAAALLLLLLLLKKKKKKKKKRRRRRRRRRRRLLLLLLLLTTTTTTTLLLLLLLLNNNNNNNNAAAAADDDDDDDDSSSSSSVVVVVVVVVVVVVVVVVVVVVLLLLLLLLDDDDDDDDNNNNNNNNAAAAAAAAAALLLLLLLLAAAAAHHHHHHHHHHIIIIIIIIAAAAAAAAAADDDDDDDDRRRRRRRRRRRLLLLLLLLHHHHHHHHHHTTTTTTTQQQQQQQQQNNNNNNNNPPPPPPPTTTTTTTFFFFFFFFFFFHHHHHHHHHHQQQQQQQQQQQQQQQQQQNNNNNNNNQQQQQQQQQLLLLLLLLVVVVVVVSSSSSSTTTTTTTVVVVVVVMMMMMMMMSSSSSSAAAAASSSSSSTTTTTTTTTTTTTTTTTTTTTLLLLLLLLRRRRRRRRRRRYYYYYYYYYYYYPPPPPPPGGGGYYYYYYYYYYYYMMMMMMMMNNNNNNNNNNNNNNNNDDDDDDDDLLLLLLLLVVVVVVVSSSSSSIIIIIIIIIIIIIIIIAAAAASSSSSSLLLLLLLLIIIIIIIIPPPPPPPSSSSSSPPPPPPPRRRRRRRRRRRCCCCCCHHHHHHHHHHFFFFFFFFFFFLLLLLLLLLLLLLLLLTTTTTTTSSSSSSYYYYYYYYYYYYTTTTTTTPPPPPPPFFFFFFFFFFFTTTTTTTNNNNNNNNQQQQQQQQQQQQQQQQQQVVVVVVVEEEEEEEEEEEEEEEEEEAAAAAKKKKKKKKKAAAAAIIIIIIIIRRRRRRRRRRRKKKKKKKKKTTTTTTTTTTTTTTVVVVVVVLLLLLLLLDDDDDDDDVVVVVVVMMMMMMMMRRRRRRRRRRRRRRRRRRRRRRLLLLLLLLLLLLLLLLLLLLLLLLPPPPPPPKKKKKKKKKNNNNNNNNQQQQQQQQQMMMMMMMMVVVVVVVSSSSSSVVVVVVVNNNNNNNNPPPPPPPSSSSSSKKKKKKKKKKKKKKKKKKSSSSSSCCCCCCFFFFFFFFFFFIIIIIIIISSSSSSIIIIIIIILLLLLLLLDDDDDDDDIIIIIIIIIIIIIIIIQQQQQQQQQGGGGEEEEEEEEEAAAAADDDDDDDDPPPPPPPAAAAADDDDDDDDVVVVVVVHHHHHHHHHHKKKKKKKKKSSSSSSLLLLLLLLLLLLLLLLRRRRRRRRRRRIIIIIIIIRRRRRRRRRRREEEEEEEEERRRRRRRRRRRRRRRRRRRRRRYYYYYYYYYYYYAAAAASSSSSSFFFFFFFFFFFIIIIIIIIPPPPPPPWWWWWWWWWWWWWWGGGGPPPPPPPAAAAASSSSSSIIIIIIIIQQQQQQQQQVVVVVVVAAAAALLLLLLLLSSSSSSKKKKKKKKKKKKKKKKKKSSSSSSPPPPPPPYYYYYYYYYYYYIIIIIIIIKKKKKKKKKTTTTTTTNNNNNNNNHHHHHHHHHHRRRRRRRRRRRVVVVVVVSSSSSSGGGGLLLLLLLLMMMMMMMMLLLLLLLLAAAAANNNNNNNNHHHHHHHHHHTTTTTTTSSSSSSIIIIIIIIAAAAASSSSSSLLLLLLLLFFFFFFFFFFFKKKKKKKKKRRRRRRRRRRRTTTTTTTLLLLLLLLDDDDDDDDQQQQQQQQQYYYYYYYYYYYYDDDDDDDDRRRRRRRRRRRLLLLLLLLRRRRRRRRRRRKKKKKKKKKRRRRRRRRRRRNNNNNNNNAAAAAFFFFFFFFFFFLLLLLLLLEEEEEEEEEQQQQQQQQQYYYYYYYYYYYYKKKKKKKKKKKKKKKKKKEEEEEEEEEAAAAAIIIIIIIIFFFFFFFFFFFEEEEEEEEEDDDDDDDDDDDDDDDDLLLLLLLLNNNNNNNNEEEEEEEEEFFFFFFFFFFFDDDDDDDDSSSSSSSSSSSSRRRRRRRRRRRDDDDDDDDVVVVVVVVVVVVVVAAAAADDDDDDDDLLLLLLLLIIIIIIIINNNNNNNNEEEEEEEEEYYYYYYYYYYYYEEEEEEEEEAAAAACCCCCCEEEEEEEEEDDDDDDDDPPPPPPPNNNNNNNNYYYYYYYYYYYYLLLLLLLLSSSSSSLLLLLLLLL

SEQ ID NO: 288 - protein, 3697 aa, Microbotryum violaceum
MMMMMMMMPPPPPPPRRRRRRRRRRREEEEEEEEEIIIIIIIILLLLLLLLTTTTTTTVVVVVVVSSSSSSAAAAAGGGGQQQQQQQQQAAAAAGGGGNNNNNNNNQQQQQQQQQIIIIIIIIGGGGSSSSSSEEEEEEEEEFFFFFFFFFFFWWWWWWWWWWWWWWSSSSSSQQQQQQQQQLLLLLLLLCCCCCCAAAAAEEEEEEEEEHHHHHHHHHHGGGGIIIIIIIISSSSSSKKKKKKKKKEEEEEEEEEGGGGVVVVVVVLLLLLLLLEEEEEEEEEDDDDDDDDWWWWWWWWWWWWWWAAAAATTTTTTTDDDDDDDDMMMMMMMMTTTTTTTDDDDDDDDRRRRRRRRRRRKKKKKKKKKDDDDDDDDVVVVVVVFFFFFFFFFFFFFFFFFFFFFFYYYYYYYYYYYYQQQQQQQQQAAAAADDDDDDDDDDDDDDDDEEEEEEEEEHHHHHHHHHHYYYYYYYYYYYYIIIIIIIIPPPPPPPRRRRRRRRRRRAAAAAVVVVVVVMMMMMMMMIIIIIIIIDDDDDDDDLLLLLLLLEEEEEEEEEPPPPPPPRRRRRRRRRRRVVVVVVVLLLLLLLLDDDDDDDDSSSSSSIIIIIIIIKKKKKKKKKSSSSSSGGGGPPPPPPPYYYYYYYYYYYYKKKKKKKKKNNNNNNNNLLLLLLLLYYYYYYYYYYYYNNNNNNNNPPPPPPPEEEEEEEEENNNNNNNNFFFFFFFFFFFFFFFFFFFFFFYYYYYYYYYYYYDDDDDDDDPPPPPPPQQQQQQQQQGGGGGGGGGGGGAAAAAGGGGNNNNNNNNNNNNNNNNWWWWWWWWWWWWWWAAAAAKKKKKKKKKGGGGYYYYYYYYYYYYAAAAAAAAAAGGGGEEEEEEEEERRRRRRRRRRRVVVVVVVYYYYYYYYYYYYEEEEEEEEEEEEEEEEEEVVVVVVVMMMMMMMMEEEEEEEEEMMMMMMMMIIIIIIIIDDDDDDDDRRRRRRRRRRREEEEEEEEEAAAAAEEEEEEEEEGGGGSSSSSSDDDDDDDDSSSSSSLLLLLLLLEEEEEEEEEGGGGFFFFFFFFFFFMMMMMMMMLLLLLLLLLLLLLLLLHHHHHHHHHHSSSSSSIIIIIIIIAAAAAGGGGGGGGTTTTTTTGGGGSSSSSSGGGGLLLLLLLLGGGGSSSSSSYYYYYYYYYYYYLLLLLLLLLLLLLLLLEEEEEEEEERRRRRRRRRRRMMMMMMMMNNNNNNNNDDDDDDDDRRRRRRRRRRRYYYYYYYYYYYYPPPPPPPKKKKKKKKKKKKKKKKKKLLLLLLLLIIIIIIIIQQQQQQQQQTTTTTTTYYYYYYYYYYYYSSSSSSVVVVVVVFFFFFFFFFFFPPPPPPPDDDDDDDDAAAAADDDDDDDDSSSSSSGGGGDDDDDDDDVVVVVVVVVVVVVVVVVVVVVQQQQQQQQQPPPPPPPYYYYYYYYYYYYNNNNNNNNSSSSSSLLLLLLLLLLLLLLLLSSSSSSMMMMMMMMKKKKKKKKKRRRRRRRRRRRLLLLLLLLTTTTTTTNNNNNNNNHHHHHHHHHHAAAAADDDDDDDDSSSSSSVVVVVVVIIIIIIIIVVVVVVVLLLLLLLLDDDDDDDDNNNNNNNNAAAAAAAAAALLLLLLLLSSSSSSKKKKKKKKKIIIIIIIICCCCCCQQQQQQQQQDDDDDDDDRRRRRRRRRRRLLLLLLLLHHHHHHHHHHVVVVVVVQQQQQQQQQVVVVVVVAAAAASSSSSSFFFFFFFFFFFAAAAAQQQQQQQQQTTTTTTTNNNNNNNNQQQQQQQQQLLLLLLLLVVVVVVVSSSSSSTTTTTTTVVVVVVVMMMMMMMMSSSSSSAAAAASSSSSSTTTTTTTQQQQQQQQQTTTTTTTLLLLLLLLRRRRRRRRRRRYYYYYYYYYYYYPPPPPPPGGGGYYYYYYYYYYYYMMMMMMMMNNNNNNNNNNNNNNNNDDDDDDDDLLLLLLLLVVVVVVVGGGGMMMMMMMMIIIIIIIIAAAAASSSSSSLLLLLLLLIIIIIIIIPPPPPPPTTTTTTTPPPPPPPRRRRRRRRRRRCCCCCCHHHHHHHHHHFFFFFFFFFFFLLLLLLLLTTTTTTTTTTTTTTSSSSSSYYYYYYYYYYYYTTTTTTTPPPPPPPFFFFFFFFFFFTTTTTTTSSSSSSDDDDDDDDKKKKKKKKKIIIIIIIIEEEEEEEEEQQQQQQQQQAAAAAKKKKKKKKKAAAAAVVVVVVVRRRRRRRRRRRKKKKKKKKKTTTTTTTTTTTTTTVVVVVVVLLLLLLLLDDDDDDDDVVVVVVVMMMMMMMMRRRRRRRRRRRRRRRRRRRRRRLLLLLLLLLLLLLLLLQQQQQQQQQPPPPPPPKKKKKKKKKNNNNNNNNRRRRRRRRRRRLLLLLLLLVVVVVVVSSSSSSMMMMMMMMPPPPPPPTTTTTTTTTTTTTTPPPPPPPSSSSSSRRRRRRRRRRRHHHHHHHHHHAAAAACCCCCCYYYYYYYYYYYYIIIIIIIISSSSSSIIIIIIIILLLLLLLLNNNNNNNNIIIIIIIIIIIIIIIIQQQQQQQQQGGGGEEEEEEEEEVVVVVVVDDDDDDDDPPPPPPPTTTTTTTDDDDDDDDVVVVVVVHHHHHHHHHHKKKKKKKKKSSSSSSLLLLLLLLLLLLLLLLRRRRRRRRRRRIIIIIIIIRRRRRRRRRRREEEEEEEEERRRRRRRRRRRNNNNNNNNSSSSSSAAAAATTTTTTTFFFFFFFFFFFIIIIIIIIPPPPPPPWWWWWWWWWWWWWWGGGGPPPPPPPAAAAASSSSSSIIIIIIIIQQQQQQQQQVVVVVVVAAAAALLLLLLLLTTTTTTTKKKKKKKKKQQQQQQQQQSSSSSSPPPPPPPYYYYYYYYYYYYVVVVVVVQQQQQQQQQTTTTTTTTTTTTTTHHHHHHHHHHKKKKKKKKKVVVVVVVSSSSSSGGGGLLLLLLLLMMMMMMMMLLLLLLLLAAAAANNNNNNNNHHHHHHHHHHTTTTTTTNNNNNNNNIIIIIIIIAAAAASSSSSSIIIIIIIIFFFFFFFFFFFKKKKKKKKKRRRRRRRRRRRTTTTTTTVVVVVVVAAAAAQQQQQQQQQYYYYYYYYYYYYDDDDDDDDQQQQQQQQQLLLLLLLLRRRRRRRRRRRKKKKKKKKKRRRRRRRRRRRNNNNNNNNAAAAAFFFFFFFFFFFMMMMMMMMPPPPPPPQQQQQQQQQYYYYYYYYYYYYQQQQQQQQQKKKKKKKKKEEEEEEEEEAAAAAMMMMMMMMFFFFFFFFFFFEEEEEEEEEKKKKKKKKKNNNNNNNNLLLLLLLLDDDDDDDDEEEEEEEEEFFFFFFFFFFFDDDDDDDDEEEEEEEEEAAAAARRRRRRRRRRRAAAAATTTTTTTVVVVVVVQQQQQQQQQDDDDDDDDLLLLLLLLIIIIIIIIEEEEEEEEEEEEEEEEEEYYYYYYYYYYYYQQQQQQQQQAAAAACCCCCCEEEEEEEEEKKKKKKKKKAAAAADDDDDDDDYYYYYYYYYYYYIIIIIIIIDDDDDDDDYYYYYYYYYYYYGGGGAAAAAGGGGPPPPPPPGGGGYYYYYYYYYYYYVVVVVVVKKKKKKKKKGGGGEEEEEEEEEDDDDDDDDRRRRRRRRRRRRRRRRRRRRRREEEEEEEEEKKKKKKKKKGGGGRRRRRRRRRRREEEEEEEEEAAAAAVVVVVVVEEEEEEEEEGGGGG

SEQ ID NO: 289 - protein, 3603 aa, Xenopus laevis
MMMMMMMMPPPPPPPRRRRRRRRRRREEEEEEEEEIIIIIIIIIIIIIIIITTTTTTTLLLLLLLLQQQQQQQQQLLLLLLLLGGGGQQQQQQQQQCCCCCCGGGGNNNNNNNNQQQQQQQQQIIIIIIIIGGGGFFFFFFFFFFFEEEEEEEEEFFFFFFFFFFFWWWWWWWWWWWWWWKKKKKKKKKQQQQQQQQQLLLLLLLLCCCCCCAAAAAEEEEEEEEEHHHHHHHHHHGGGGIIIIIIIISSSSSSPPPPPPPEEEEEEEEEGGGGIIIIIIIIVVVVVVVEEEEEEEEEEEEEEEEEEFFFFFFFFFFFAAAAATTTTTTTEEEEEEEEEGGGGTTTTTTTDDDDDDDDRRRRRRRRRRRKKKKKKKKKDDDDDDDDVVVVVVVFFFFFFFFFFFFFFFFFFFFFFYYYYYYYYYYYYQQQQQQQQQAAAAADDDDDDDDDDDDDDDDEEEEEEEEEHHHHHHHHHHYYYYYYYYYYYYIIIIIIIIPPPPPPPRRRRRRRRRRRAAAAAVVVVVVVLLLLLLLLLLLLLLLLDDDDDDDDLLLLLLLLEEEEEEEEEPPPPPPPRRRRRRRRRRRVVVVVVVIIIIIIIIHHHHHHHHHHSSSSSSIIIIIIIILLLLLLLLNNNNNNNNSSSSSSPPPPPPPYYYYYYYYYYYYAAAAANNNNNNNNLLLLLLLLYYYYYYYYYYYYNNNNNNNNPPPPPPPEEEEEEEEENNNNNNNNIIIIIIIIYYYYYYYYYYYYLLLLLLLLSSSSSSEEEEEEEEEHHHHHHHHHHGGGGGGGGGGGGAAAAAGGGGNNNNNNNNNNNNNNNNWWWWWWWWWWWWWWAAAAASSSSSSGGGGFFFFFFFFFFFSSSSSSQQQQQQQQQGGGGEEEEEEEEEKKKKKKKKKIIIIIIIIHHHHHHHHHHEEEEEEEEEDDDDDDDDIIIIIIIIFFFFFFFFFFFDDDDDDDDIIIIIIIIIIIIIIIIDDDDDDDDRRRRRRRRRRREEEEEEEEEAAAAADDDDDDDDGGGGSSSSSSDDDDDDDDSSSSSSLLLLLLLLEEEEEEEEEGGGGFFFFFFFFFFFVVVVVVVLLLLLLLLCCCCCCHHHHHHHHHHSSSSSSIIIIIIIIAAAAAGGGGGGGGTTTTTTTGGGGSSSSSSGGGGLLLLLLLLGGGGSSSSSSYYYYYYYYYYYYLLLLLLLLLLLLLLLLEEEEEEEEERRRRRRRRRRRLLLLLLLLNNNNNNNNDDDDDDDDRRRRRRRRRRRYYYYYYYYYYYYPPPPPPPKKKKKKKKKKKKKKKKKKLLLLLLLLVVVVVVVQQQQQQQQQTTTTTTTYYYYYYYYYYYYSSSSSSVVVVVVVFFFFFFFFFFFPPPPPPPNNNNNNNNQQQQQQQQQDDDDDDDDEEEEEEEEEMMMMMMMMSSSSSSHHHHHHHHHHVVVVVVVVVVVVVVVVVVVVVQQQQQQQQQPPPPPPPYYYYYYYYYYYYNNNNNNNNSSSSSSLLLLLLLLLLLLLLLLTTTTTTTLLLLLLLLKKKKKKKKKRRRRRRRRRRRLLLLLLLLTTTTTTTQQQQQQQQQNNNNNNNNAAAAADDDDDDDDCCCCCCVVVVVVVVVVVVVVVVVVVVVLLLLLLLLDDDDDDDDNNNNNNNNTTTTTTTAAAAALLLLLLLLNNNNNNNNRRRRRRRRRRRIIIIIIIIAAAAATTTTTTTDDDDDDDDRRRRRRRRRRRLLLLLLLLHHHHHHHHHHIIIIIIIIQQQQQQQQQNNNNNNNNPPPPPPPSSSSSSFFFFFFFFFFFSSSSSSQQQQQQQQQIIIIIIIINNNNNNNNQQQQQQQQQLLLLLLLLVVVVVVVSSSSSSTTTTTTTIIIIIIIIMMMMMMMMSSSSSSAAAAASSSSSSTTTTTTTTTTTTTTTTTTTTTLLLLLLLLRRRRRRRRRRRYYYYYYYYYYYYPPPPPPPGGGGYYYYYYYYYYYYMMMMMMMMNNNNNNNNNNNNNNNNDDDDDDDDLLLLLLLLIIIIIIIIGGGGLLLLLLLLIIIIIIIIAAAAASSSSSSLLLLLLLLIIIIIIIIPPPPPPPTTTTTTTPPPPPPPRRRRRRRRRRRLLLLLLLLHHHHHHHHHHFFFFFFFFFFFLLLLLLLLMMMMMMMMTTTTTTTGGGGYYYYYYYYYYYYTTTTTTTPPPPPPPLLLLLLLLTTTTTTTTTTTTTTDDDDDDDDQQQQQQQQQSSSSSSVVVVVVVAAAAASSSSSSVVVVVVVRRRRRRRRRRRKKKKKKKKKTTTTTTTTTTTTTTVVVVVVVLLLLLLLLDDDDDDDDVVVVVVVMMMMMMMMRRRRRRRRRRRRRRRRRRRRRRLLLLLLLLLLLLLLLLQQQQQQQQQPPPPPPPKKKKKKKKKNNNNNNNNVVVVVVVMMMMMMMMVVVVVVVSSSSSSTTTTTTTGGGGRRRRRRRRRRRDDDDDDDDRRRRRRRRRRRQQQQQQQQQTTTTTTTNNNNNNNNHHHHHHHHHHCCCCCCYYYYYYYYYYYYIIIIIIIIAAAAAIIIIIIIILLLLLLLLNNNNNNNNIIIIIIIIIIIIIIIIQQQQQQQQQGGGGEEEEEEEEEVVVVVVVDDDDDDDDPPPPPPPTTTTTTTQQQQQQQQQVVVVVVVHHHHHHHHHHKKKKKKKKKSSSSSSLLLLLLLLQQQQQQQQQRRRRRRRRRRRIIIIIIIIRRRRRRRRRRREEEEEEEEERRRRRRRRRRRKKKKKKKKKLLLLLLLLAAAAANNNNNNNNFFFFFFFFFFFIIIIIIIIPPPPPPPWWWWWWWWWWWWWWGGGGPPPPPPPAAAAASSSSSSIIIIIIIIQQQQQQQQQVVVVVVVAAAAALLLLLLLLSSSSSSRRRRRRRRRRRKKKKKKKKKSSSSSSPPPPPPPYYYYYYYYYYYYLLLLLLLLPPPPPPPSSSSSSAAAAAHHHHHHHHHHRRRRRRRRRRRVVVVVVVSSSSSSGGGGLLLLLLLLMMMMMMMMMMMMMMMMAAAAANNNNNNNNHHHHHHHHHHTTTTTTTNNNNNNNNIIIIIIIISSSSSSSSSSSSLLLLLLLLFFFFFFFFFFFEEEEEEEEERRRRRRRRRRRTTTTTTTCCCCCCRRRRRRRRRRRQQQQQQQQQYYYYYYYYYYYYDDDDDDDDKKKKKKKKKLLLLLLLLRRRRRRRRRRRKKKKKKKKKRRRRRRRRRRREEEEEEEEEAAAAAFFFFFFFFFFFLLLLLLLLEEEEEEEEEQQQQQQQQQFFFFFFFFFFFRRRRRRRRRRRKKKKKKKKKEEEEEEEEEDDDDDDDDIIIIIIIIFFFFFFFFFFFKKKKKKKKKDDDDDDDDNNNNNNNNFFFFFFFFFFFDDDDDDDDEEEEEEEEELLLLLLLLDDDDDDDDNNNNNNNNSSSSSSRRRRRRRRRRREEEEEEEEEIIIIIIIIVVVVVVVQQQQQQQQQQQQQQQQQQLLLLLLLLIIIIIIIIDDDDDDDDEEEEEEEEEYYYYYYYYYYYYHHHHHHHHHHAAAAAAAAAATTTTTTTRRRRRRRRRRRPPPPPPPDDDDDDDDYYYYYYYYYYYYIIIIIIIISSSSSSWWWWWWWWWWWWWWGGGGTTTTTTTQQQQQQQQQDDDDDDDDKKKKKKKKKK

SEQ ID NO: 290 - protein, 3700 aa, Saccharomyces cerevisiae
MMMMMMMMGGGGGGGGEEEEEEEEEIIIIIIIIIIIIIIIITTTTTTTLLLLLLLLQQQQQQQQQAAAAAGGGGQQQQQQQQQCCCCCCGGGGNNNNNNNNHHHHHHHHHHVVVVVVVGGGGKKKKKKKKKFFFFFFFFFFFLLLLLLLLWWWWWWWWWWWWWWSSSSSSQQQQQQQQQLLLLLLLLAAAAAKKKKKKKKKEEEEEEEEEHHHHHHHHHHAAAAAIIIIIIIIGGGGTTTTTTTDDDDDDDDGGGGLLLLLLLLSSSSSSQQQQQQQQQLLLLLLLLPPPPPPPDDDDDDDDSSSSSSSSSSSSTTTTTTTEEEEEEEEERRRRRRRRRRRDDDDDDDDDDDDDDDDDDDDDDDDTTTTTTTKKKKKKKKKPPPPPPPFFFFFFFFFFFFFFFFFFFFFFRRRRRRRRRRREEEEEEEEENNNNNNNNSSSSSSRRRRRRRRRRRNNNNNNNNKKKKKKKKKFFFFFFFFFFFTTTTTTTPPPPPPPRRRRRRRRRRRAAAAAIIIIIIIIMMMMMMMMMMMMMMMMDDDDDDDDSSSSSSEEEEEEEEEPPPPPPPSSSSSSVVVVVVVIIIIIIIIAAAAADDDDDDDDVVVVVVVEEEEEEEEENNNNNNNNTTTTTTTFFFFFFFFFFFRRRRRRRRRRRGGGGFFFFFFFFFFFFFFFFFFFFFFDDDDDDDDPPPPPPPRRRRRRRRRRRNNNNNNNNTTTTTTTWWWWWWWWWWWWWWVVVVVVVAAAAASSSSSSDDDDDDDDGGGGAAAAASSSSSSAAAAAGGGGNNNNNNNNSSSSSSWWWWWWWWWWWWWWAAAAANNNNNNNNGGGGYYYYYYYYYYYYDDDDDDDDIIIIIIIIGGGGTTTTTTTRRRRRRRRRRRNNNNNNNNQQQQQQQQQDDDDDDDDDDDDDDDDIIIIIIIILLLLLLLLNNNNNNNNKKKKKKKKKIIIIIIIIDDDDDDDDKKKKKKKKKEEEEEEEEEIIIIIIIIDDDDDDDDSSSSSSTTTTTTTDDDDDDDDNNNNNNNNFFFFFFFFFFFEEEEEEEEEGGGGFFFFFFFFFFFQQQQQQQQQLLLLLLLLLLLLLLLLHHHHHHHHHHSSSSSSVVVVVVVAAAAAGGGGGGGGTTTTTTTGGGGSSSSSSGGGGLLLLLLLLGGGGSSSSSSNNNNNNNNLLLLLLLLLLLLLLLLEEEEEEEEEAAAAALLLLLLLLCCCCCCDDDDDDDDRRRRRRRRRRRYYYYYYYYYYYYPPPPPPPKKKKKKKKKKKKKKKKKKIIIIIIIILLLLLLLLTTTTTTTTTTTTTTYYYYYYYYYYYYSSSSSSVVVVVVVFFFFFFFFFFFPPPPPPPAAAAARRRRRRRRRRRSSSSSSSSSSSSEEEEEEEEEVVVVVVVVVVVVVVVVVVVVVQQQQQQQQQSSSSSSYYYYYYYYYYYYNNNNNNNNTTTTTTTIIIIIIIILLLLLLLLAAAAALLLLLLLLRRRRRRRRRRRRRRRRRRRRRRLLLLLLLLIIIIIIIIEEEEEEEEEDDDDDDDDSSSSSSDDDDDDDDAAAAATTTTTTTVVVVVVVVVVVVVVFFFFFFFFFFFDDDDDDDDNNNNNNNNAAAAASSSSSSLLLLLLLLLLLLLLLLNNNNNNNNIIIIIIIISSSSSSGGGGKKKKKKKKKVVVVVVVFFFFFFFFFFFRRRRRRRRRRRNNNNNNNNPPPPPPPNNNNNNNNIIIIIIIIDDDDDDDDLLLLLLLLQQQQQQQQQHHHHHHHHHHTTTTTTTNNNNNNNNQQQQQQQQQLLLLLLLLIIIIIIIISSSSSSTTTTTTTIIIIIIIIIIIIIIIISSSSSSSSSSSSVVVVVVVTTTTTTTNNNNNNNNSSSSSSIIIIIIIIRRRRRRRRRRRFFFFFFFFFFFPPPPPPPSSSSSSYYYYYYYYYYYYMMMMMMMMYYYYYYYYYYYYSSSSSSSSSSSSMMMMMMMMSSSSSSSSSSSSIIIIIIIIYYYYYYYYYYYYSSSSSSTTTTTTTLLLLLLLLIIIIIIIIPPPPPPPSSSSSSPPPPPPPEEEEEEEEELLLLLLLLHHHHHHHHHHFFFFFFFFFFFLLLLLLLLSSSSSSPPPPPPPSSSSSSFFFFFFFFFFFTTTTTTTPPPPPPPFFFFFFFFFFFTTTTTTTSSSSSSDDDDDDDDYYYYYYYYYYYYIIIIIIIIHHHHHHHHHHDDDDDDDDDDDDDDDDIIIIIIIIAAAAAHHHHHHHHHHKKKKKKKKKGGGGHHHHHHHHHHSSSSSSSSSSSSYYYYYYYYYYYYDDDDDDDDVVVVVVVMMMMMMMMLLLLLLLLDDDDDDDDLLLLLLLLLLLLLLLLDDDDDDDDPPPPPPPSSSSSSNNNNNNNNSSSSSSLLLLLLLLVVVVVVVSSSSSSTTTTTTTAAAAAMMMMMMMMNNNNNNNNNNNNNNNNPPPPPPPTTTTTTTYYYYYYYYYYYYFFFFFFFFFFFNNNNNNNNVVVVVVVYYYYYYYYYYYYNNNNNNNNTTTTTTTIIIIIIIIIIIIIIIIGGGGNNNNNNNNVVVVVVVEEEEEEEEEPPPPPPPRRRRRRRRRRRQQQQQQQQQIIIIIIIISSSSSSRRRRRRRRRRRAAAAAMMMMMMMMTTTTTTTKKKKKKKKKLLLLLLLLQQQQQQQQQQQQQQQQQQRRRRRRRRRRRIIIIIIIIKKKKKKKKKFFFFFFFFFFFPPPPPPPSSSSSSWWWWWWWWWWWWWWSSSSSSSSSSSSSSSSSSAAAAAMMMMMMMMHHHHHHHHHHVVVVVVVNNNNNNNNIIIIIIIIGGGGRRRRRRRRRRRRRRRRRRRRRRSSSSSSPPPPPPPYYYYYYYYYYYYLLLLLLLLPPPPPPPLLLLLLLLQQQQQQQQQPPPPPPPNNNNNNNNEEEEEEEEENNNNNNNNEEEEEEEEEVVVVVVVSSSSSSGGGGMMMMMMMMMMMMMMMMLLLLLLLLSSSSSSNNNNNNNNMMMMMMMMSSSSSSTTTTTTTVVVVVVVVVVVVVVNNNNNNNNVVVVVVVFFFFFFFFFFFEEEEEEEEENNNNNNNNAAAAACCCCCCNNNNNNNNTTTTTTTFFFFFFFFFFFDDDDDDDDKKKKKKKKKVVVVVVVFFFFFFFFFFFAAAAAKKKKKKKKKGGGGAAAAAFFFFFFFFFFFLLLLLLLLNNNNNNNNNNNNNNNNYYYYYYYYYYYYNNNNNNNNVVVVVVVGGGGDDDDDDDDLLLLLLLLFFFFFFFFFFFQQQQQQQQQSSSSSSMMMMMMMMQQQQQQQQQNNNNNNNNVVVVVVVQQQQQQQQQDDDDDDDDEEEEEEEEEFFFFFFFFFFFAAAAAEEEEEEEEESSSSSSRRRRRRRRRRREEEEEEEEEVVVVVVVVVVVVVVQQQQQQQQQSSSSSSLLLLLLLLMMMMMMMMEEEEEEEEEDDDDDDDDYYYYYYYYYYYYVVVVVVVAAAAAAAAAAEEEEEEEEEQQQQQQQQQDDDDDDDDSSSSSSYYYYYYYYYYYYLLLLLLLLDDDDDDDDDDDDDDDDVVVVVVVLLLLLLLLVVVVVVVDDDDDDDDDDDDDDDDEEEEEEEEENNNNNNNNMMMMMMMMVVVVVVVGGGGEEEEEEEEELLLLLLLLEEEEEEEEEEEEEEEEEEDDDDDDDDLLLLLLLLDDDDDDDDAAAAADDDDDDDDGGGGDDDDDDDDHHHHHHHHHHKKKKKKKKKLLLLLLLLVVVVVVVV

SEQ ID NO: 291 - DNA, 3495 bp, Homo sapiens
ggggcagtattctgtgttgagggaggaaaaacactcccttccaaaagcatgacaggcagaaagcagagaagggccaggactggctgagggcggggagctgggcctctggggtggacacacccttggtcacattgtgagggtagcttggttggccagtcccaccactgcagtgaccacagttgtgttgggctcacaccagtgaaccgaagctctggattctgagagtctgaggattccgtgaagatctcagacttgggctcagagcaaggatgcgtgaaattgtccatattcagattggccagtgtggcaaccagatcggagccaagttctgggagatgattggtgaggaacacgggatcgacttggctgggagcgaccgcggggcctcggccttgcagctggagagaatcagcgtgtactacaacgaagcctacggtaggaaatatgtgccccgagcagtcttggtggacctagaacctgggacgatggacagcattcgatctagcaaattaggagctctctttcaacccgacagttttgtccatggtaactctggggctggcaacaactgggccaaaggccactacacggagggagccgagctgatcgagaatgtcctagaggtggtgaggcacgagagtgagagctgtgactgcctgcagggcttccagatcgtccactccctgggcgggggcacaggctccgggatgggcactctgctcatgaacaagattagagaggagtacccggaccggatcatgaattccttcagcgtcatgccttctcccaaggtgtcggacacggtggtggagccctacaacgcggttctgtctatccaccagctgattgagaatgcagatgcctgtttctgcattgacaatgaggccctctatgacatctgcttccgtaccctgaagctgacgacacccacctatggggatctcaaccacctagtgtccttgaccatgagcggcataaccacctccctccggttcccgggtcagctcaacgcagacctgcgcaagctggcggtgaacatggtccccttcccccgcctgcacttctttatgcccggctttgccccactcacggcccagggcagccagcagtaccgagccctctccgtggccgagctcacccagcagatgttcgatgcccgcaataccatggctgcctgtgacctccgccgtggccgctacctcacagtggcctgcattttccggggcaagatgtccaccaaggaagtggaccagcaactgctctccgtgcagaccaggaacagcagctgctttgtggagtggattcccaacaacgtcaaggtggctgtctgcgacatcccgccccgggggctgagcatggccgccaccttcattggcaacaacacggccatccaagagatctttaatagggtctctgagcatttctcagccatgttcaaaaggaaagcttttgtgcactggtacaccagcgaagggatggacataaacgaatttggggaagctgaaaataacatccatgatttggtatccgagtaccaacaatttcaagatgccaaagcagttctagaggaagatgaagaggtcacggaggaggcagaaatggagccagaagataagggacattaactgtgagagaagctgtgccgcggagtcgcttacagaacagtttctcattagatgagtgtttctcctgcagcactccaaaacccactctgcactgcagcacagtgaatgatatgcactcaccattagcttcgacacagggactgagggagacaggtggggagcagctgacaggcattagggtctttgctgacatctactaaccttgaagagtttgatgttcagtgcatacttattaacttaaaaaaatagcaaatttattgtaaagtgctccctttgtttcaaagtgtttgccaggcatccagactacacgtgtggatttgcagggagccactggagttggtgttacatttttatactttagcagcactgataggcaccctggaatcctcacttggtatccgagggctactaagactctttccttaggttctttcctctgagcaaacactgactggcatcctgctttccagtgcctgccagcctccagaagagccaggtgcctgactagtacatggggagctacagagccaaggtcaatgtgagtcaacatccactagaaatatccatgttgtgtagacctgtgcatacaacatgctaactggaaaagaggaaaaaagaaaagccacagtcctctccacaaaaatacctggtccaaacaagaaaaacaaaaagacaagaaaaactaaagaactgcagtcttctgatctttatttctgaagagctagcctttaacatatatgtttatatagtttaaatttcttactactgttagatcccaggaattcattaataatcatccttggctttccttttaaaggctattttgaaatggtcttttcactttcattcagtcatcaccccccaaaatgctctgcagcctctctgctctttgagaaagggcacaccatgcgctcggcaaccattcaaatgcaggaattaagcagcaatggctgcagtgtccttctcagttatggaggacatcgtctcattagggaacttttacagttcaaattaatttctagaagttgccataaatgtttgcataatgacatagctttagcactacatgattttaatctgctcacattataacaggaccaaatacacaagagcgtaatcaaatcatctgtaacttcttaattacagtttacctatttctgacatgcagcactgccatctcttccagcaccatcagggttttaatggccctctagaattaccactgagatacactatttgatccatggataaccggtaatgggaaaatgctccgaccctcaatgcagtaaatatttacttgcaggcaactgggttctcatctcttgatttgcttttgtaatcagcaataataaaatagcaggtagatggatgacagttgctcattctgagaaacttcactcttttcacttatgcatcacgaggaaataactaaaatacataccaagagaaaaataccttgccatcggatcatcaacaagtcttctatttacaaacttcaaaaaacacaaaacaacattcatgttttaaatgctttctatttgtggttcaagaagcactagatttagtaagaaactctacctatatacttagtttgaagttagtaacttcctgagatgctaaagacttacagcctgcgattatacaaggatttacacatgctccgtctggtgctttacttcccaaacctaaaaaagcaatgaaatagatgtaaggaaggagggatttaaaccttttaaaaaacttttgctgacttatattactgtaaagatttgtttgctcaatagtaatcattaaactacaaagtaattcaattttaaatggcaaaattgctttatttcagactaaataaattccttttcttgaagcctaa

SEQ ID NO: 292 - DNA, 1356 bp, Homo sapiens
atgcgtgaaattgtccatattcagattggccagtgtggcaaccagatcggagccaagttctgggagatgattggtgaggaacacgggatcgacttggctgggagcgaccgcggggcctcggccttgcagctggagagaatcagcgtgtactacaacgaagcctacggtaggaaatatgtgccccgagcagtcttggtggacctagaacctgggacgatggacagcattcgatctagcaaattaggagctctctttcaacccgacagttttgtccatggtaactctggggctggcaacaactgggccaaaggccactacacggagggagccgagctgatcgagaatgtcctagaggtggtgaggcacgagagtgagagctgtgactgcctgcagggcttccagatcgtccactccctgggcgggggcacaggctccgggatgggcactctgctcatgaacaagattagagaggagtacccggaccggatcatgaattccttcagcgtcatgccttctcccaaggtgtcggacacggtggtggagccctacaacgcggttctgtctatccaccagctgattgagaatgcagatgcctgtttctgcattgacaatgaggccctctatgacatctgcttccgtaccctgaagctgacgacacccacctatggggatctcaaccacctagtgtccttgaccatgagcggcataaccacctccctccggttcccgggtcagctcaacgcagacctgcgcaagctggcggtgaacatggtccccttcccccgcctgcacttctttatgcccggctttgccccactcacggcccagggcagccagcagtaccgagccctctccgtggccgagctcacccagcagatgttcgatgcccgcaataccatggctgcctgtgacctccgccgtggccgctacctcacagtggcctgcattttccggggcaagatgtccaccaaggaatcggaccagcaactgctctccgtgcagaccaggaacagcagctgctttgtggagtggattcccaacaacgtcaaggtggctgtctgcgacatcccgccccgggggctgagcatggccgccaccttcattggcaacaacacggccatccaagagatctttaatagggtctctgagcatttctcagccatgttcaaaaggaaagcttttgtgcactggtacaccagcgaagggatggacataaacgaatttggggaagctgaaaataacatccatgatttggtatccgagtaccaacaatttcaagatgccaaagcagttctagaggaagatgaagaggtcacggaggaggcagaaatggagccagaagataagggacattaa

SEQ ID NO: 293 - protein, 444 aa, Cricetulus griseus
MREIVHIQAGQCGNQIGAKFWEVISDEHGIDPTGTYHGDSDLQLDRISVYYNEATGGKYVPRAILVDLEPGTMDSVRSGPFGQIFRPDNFVFGQSGAGNNWAKGHYTEGAELVDSVLDVVRKEAESCDCLQGFQLTHSLGGGTGSGMGTLLISKIREEYPDRIMNTFSVVPSPKVSDTVVEPYNATLSVHQLVENTDETYCIDNEALYDICFRTHKLTTPTYGDLNHLVSATMSGVTTCLRFPGQLNADLRKLAVNMVPFPRLHFFMPGFAPLTSRGSQQYRALTVPELTQQVFDAKNMMAACDPRHGRYLTVAAVFRGRMSMKEVDEQMLNVQNKNSSYFVEWIPNNVKTAVCDIPPRGLKMAVTFIGNSTAIQELFKRISEQFTAMFRRKAFLHWYTGEGMDQMEFTEAESNMNDLVSEYQQYQDATAEEEEDFGEEAEEEA

SEQ ID NO: 294 - protein, 444 aa, Cricetulus griseus
MREIVHIQAGQCGNQIGAKFWEVISDEHGIDPTGTYHGDSDLQLDRISVYYNEATGGKYVPRAILVDLEPGTMDSVRSGPFGQIFRPDNFVFGQSGAGNNWAKGHYTEGAELVDSVLDVVRKEAESCDCLQGFQLTHSLGGGTGSGMGTLLISKIREEYPDRIMNTFSVVPSPKVSDTVVEPYNATLSVHQLVENTDETYCIDNEALYDICFRTRKLTTPTYGDLNHLVSATMSGVTTCLRFPGQLNADLRKLAVNMVPFPRLHFFMPGFAPLTSRGSQQYRALTVPELTQQVFDAKNMMAACDPRHGRYLTVAAVFRGRMSMKEVDEQMLNVQNKNSSYFVEWIPNNVKTAVCDIPPRGLKMAVTFIGNSTAIQELFKRISEQFTAMFRRKAFLHWYTGEGMDEMEFTEAESNMNDLVSEYQQYQDATAEEEEDFGEEAEEQA

SEQ ID NO: 295 - protein, 444 aa, Cricetulus griseus
MREIVHIQAGQCGNQIGAKFWEVISDEHGIDPTGTYHGDSDLQLDRISVYYNEATGGKYVPRAILVDLEPGTMDSVRSGPFGQIFRPDNFVFGQSGAGNNWAKGHYTEGAELVDSVLDVVRKEAESCDCLQGFQLTHSLGGGTGSGMGTLLISKIREEYPDRIMNTFSVVPSPKVSDTVVEPYNATLSVHQLVENTDETYCIDNEALYDICFRTFKLTTPTYGDLNHLVSATMSGVTTCLRFPGQLNADLRKLAVNMVPFPRLHFFMPGFAPLTSRGSQQYRALTVPELTQQVFDAKNMMAACDPRHGRYLTVAAVFRGRMSMKEVDEQMLNVQNKNSSYFVEWIPNNVKTAVCDIPPRGLKMAVTFIGNSTAIQELFKRISEQFTAMFRRKAFLHWYTGEGMDEMEFTEAESNMNDLVSEYQQYQDATAEEEEDFGEEAEEEA

SEQ ID NO: 296 - protein, 444 aa, Cricetulus griseus
MREIVHIQAGQCGNQIGAKFWEVISDEHGIDPTGTYHGDSDLQLDRISVYYNEATGGKYVPRAILVDLEPGTMDSVRSGPFGQIFRPDNFVFGQSGAGNNWAKGHYTEGAELVDSVLDVVRKEAESCDCLQGFQLTHSLGGGTGSGMGTLLISKIREEYPDRIMNTFSVVPSPKVSDTVVEPYNATLSVHQLVENTDETYCIDNEALYDICFRTLKRTTPTYGDLNHLVSATMSGVTTCLRFPGQLNADLRKLAVNMVPFPRLHFFMPGFAPLTSRGSQQYRALTVPELTQQVFDAKNMMAACDPRHGRYLTVAAVFRGRMSMKQVDEQMLNVQNKNSSYFVEWIPNNVKTAVCDIPPRGLKMAVTFIGNSTAIQELFKRISEQFTAMFRRKAFLHWYTGEGMDEMEFTEAESNMNDLVSEYQQYQDATAEEEEDFGEEAEEEA

SEQ ID NO: 297 - protein, 444 aa, Cricetulus griseus
MREIVHIQAGQCGNQIGAKFWEVISDEHGIDPTGTYHGDSDLQLDRISVYYNEATGGKYVPRAILVDLEPGTMDSVRSGPFGQIFRPDNFVFGQSGAGNNWAKGHYTEGAELVDSVLDVVRKEAESCDCLQGFQLTHSLGGGTGSGMGTLLISKIREEYPDRIMNTFSVVPSPKVSDTVVEPYNATLSVHQLVENTDETYCIDNEALYDICFRTLKLTTPTYGDLNHFVSATMSGVTTCLRFPGQLNADLRKLAVNMVPFPRLHFFMPGFAPLTSRGSQQYRALTVPELTQQVFDAKNMMAACDPRHGRYLTVAAVFRGRMSMKEVDEQMLNVQNKNSSYFVEWIPNNVKTAVCDIPPRGLKMAVTFIGNSTAIQELFKRISEQFTAMFRRKAFLHWYTGEGMDEMEFTEAESNMNDLVSEYQQYQDATAEEEEDFGEEAEEEA

SEQ ID NO: 298 - protein, 444 aa, Cricetulus griseus
MREIVHIQAGQCGNQIGAKFWEVISDEHGIDPTGTYHGDSDLQLDRISVYYNEATGGKYVPRAILVDLEPGTMDSVRSGPFGQIFRPDNFVFGQSGAGNNWAKGHYTEGAELVDSVLDVVRKEAESCDCLQGFQLTHSLGGGTGSGMGTLLISKIRQEYPDRIMNTFSVVPSPKVSDTVVEPYNATLSVHQLVENTDETYCIDNEALYDICFRTLKLTTPTYGDLNHHVSATMSGVTTCLRFPGQLNADLRKLAVNMVPFPRLHFFMPGFAPLTSRGSQQYRALTVPELTQQVFDAKNMMAACDPRHGRYLTVAAVFRGRMSMKEVDEQMLNVQNKNSSYFVEWIPNNVKTAVCDIPPRGLKMAVTFIGNSTAIQELFKRISEQFTAMFRRKAFLHWYTGEGMDEMEFTEAESNMNDLVSEYQQYQDATAEEEEDFGEEAEEEA

SEQ ID NO: 299 - protein, 444 aa, Cricetulus griseus
MREIVHIQAGQCGNQIGAKFWEVISDEHGIDPTGTYHGDSDLQLDRISVYYNEATGGKYVPRAILVDLEPGTMDSVRSGPFGQIFRPDNFVFGQSGAGNNWAKGHYTEGAELVDSVLDVVRKEAESCDCLQGFQLTHSLGGGTGSGMGTLLISKIREEYPDRIMNTFSVVPSPKVSDTVVEPYNATLSVHQLVENTDETYCIDNEALYDICFRALKLTTPTYGDLNHLVSATMSGVTTCLRFPGQLNADLRKLAVNMVPFPRLHFFMPGFAPLTSRGSQQYRALTVPELTQQVFDAKNMMAACDPRHGRYLTVAAVFRGRMSMKEVDEQMLNVQNKNSSYFVEWIPNNVKTAVCDIPPRGLKMAVTFIGNSTAIQELFKRISEQFTAMFRRKAFLHWYTGEGMDEMEFTEAESNMNDLVSEYQQYQDATAEEEEDFGEEAEEEA

SEQ ID NO: 300 - protein, 444 aa, Cricetulus griseus
MREIVHIQAGQCGNQIGAKFWEVISDEHGIDPTGTYHGDSDLQLDRISVYYNEATGGKYVPRAILVDLEPGTMDSVRSGPFGQIFRPDNFVFGQSGAGNNWAKGHYTEGAELVDSVLDVVRKEAESCDCLQGFQLTHSLGGGTGSGMGTLLISKIREEYPDRIMNTFSVVPSPKVSDTVVEPYNATLSVHQLVENTDETYCIDNEALYDICFRTAKLTTPTYGDLNHLVSATMSGVTTCLRFPGQLNADLRKLAVNMVPFPRLHFFMPGFAPLTSRGSQQYRALTVPELTQQVFDAKNMMAACDPRHGRYLTVAAVFRGRMSMKEVDEQMLNVQNKNSSYFVEWIPNNVKTAVCDIPPRGLKMAVTFIGNSTAIQELFKRISEQFTAMFRRKAFLHWYTGEGMDEMEFTEAESNMNDLVSEYQQYQDATAEEEEDFGEEAEEEA

SEQ ID NO: 301 - protein, 444 aa, Cricetulus griseus
MREIVHIQAGQCGNQIGAKFWEVISDEHGIDPTGTYHGDSDLQLDRISVYYNEATGGKYVPRAILVDLEPGTMDSVRSGPFGQIFRPDNFVFGQSGAGNNWAKGHYTEGAQLVDSVLDVVRKEAESCDCLQGFQLTHSLGGGTGSGMGTLLISKIREQYPDRIMNTFSVVPSPKVSDTVVEPYNATLSVHQLVENTDQTYCIDNQALYDICFRTEKLTTPTYGDLNHLVSATMSGVTTCLRFPGQLNADLRKLAVNMVPFPRLHFFMPGFAPLTSRGSQQYRALTVPELTQQVFDAKNMMAACDPRHGRYLTVAAVFRGRMSMKEVDEQMLNVQNKNSSYFVEWIPNNVKTAVCDIPPRGLKMAVTFIGNSTAIQELFKRISQQFTAMFRRKAFLHWYTGEGMDEMEFTEAQSNMNDLVSEYQQYQDATAEEEEDFGEEAEEEA

SEQ ID NO: 302 - protein, 444 aa, Cricetulus griseus
MREIVHIQAGQCGNQIGAKFWEVISDEHGIDPTGTYHGDSDLQLDRISVYYNEATGGKYVPRAILVDLEPGTMDSVRSGPFGQIFRPDNFVFGQSGAGNNWAKGHYTEGAELVDSVLDVVRKEAESCDCLQGFQLTHSLGGGTGSGMGTLLISKIREEYPDRIMNTFSVVPSPKVSDTVVEPYNATLSVHQLVENTDETYCIDNEALYDICFRTMKLTTPTYGDLNHLVSATMSGVTTCLRFPGQLNADLRKLAVNMVPFPRLHFFMPGFAPLTSRGSQQYRALTVPELTQQVFDAKNMMAACDPRHGRYLTVAAVFRGRMSMKEVDEQMLNVQNKNSSYFVEWIPNNVKTAVCDIPPRGLKMAVTFIGNSTAIQELFKRISEQFTAMFRRKAFLHWYTGEGMDEMEFTEAESNMNDLVSEYQQYQDATAEEEEDFGEEAEEEA

SEQ ID NO: 303 - protein, 444 aa, Cricetulus griseus
MREIVHIQAGQCGNQIGAKFWEVISDEHGIDPTGTYHGDSDLQLDRISVYYNEATGGKYVPRAILVDLEPGTMDSVRSGPFGQIFRPDNFVFGQSGAGNNWAKGHYTEGAQLVDSVLDVVRKEAESCDCLQGFQLTHSLGGGTGSGMGTLLISKIREEYPDRIMNTFSVVPSPKVSDTVVEPYNATLSVHQLVENTDETYCIDNEALYDICFRTPKLTTPTYGDLNHLVSATMSGVTTCLRFPGQLNADLRKLAVNMVPFPRLHFFMPGFAPLTSRGSQQYRALTVPQLTQQVFDAKNMMAACDPRHGRYLTVAAVFRGRMSMKEVDEQMLNVQNKNSSYFVQWIPNNVKTAVCDIPPRGLKMAVTFIGNSTAIQQLFKRISQQFTAMFRRKAFLHWYTGEGMDQMQFTQAESNMNDLVSQYQQYQDATAQEQQDFGQQAQQQA

SEQ ID NO: 304 - protein, 444 aa, Cricetulus griseus
MREIVHIQAGQCGNQIGAKFWEVISDEHGIDPTGTYHGDSDLQLDRISVYYNEATGGKYVPRAILVDLEPGTMDSVRSGPFGQIFRPDNFVFGQSGAGNNWAKGHYTEGAELVDSVLDVVRKEAESCDCLQGFQLTHSLGGGTGSGMGTLLISKIREEYPDRIMNTFSVVPSPKVSDTVVEPYNATLSVHQLVENTDETYCIDNEALYDICFRTLALTTPTYGDLNHLVSATMSGVTTCLRFPGQLNADLRKLAVNMVPFPRLHFFMPGFAPLTSRGSQQYRALTVPELTQQVFDAKNMMAACDPRHGRYLTVAAVFRGRMSMKEVDEQMLNVQNKNSSYFVEWIPNNVKTAVCDIPPRGLKMAVTFIGNSTAIQELFKRISEQFTAMFRRKAFLHWYTGEGMDEMEFTEAESNMNDLVSQYQQYQDATAEEEEDFGEEAEEQA

SEQ ID NO: 305 - protein, 444 aa, Cricetulus griseus
MREIVHIQAGQCGNQIGAKFWEVISDEHGIDPTGTYHGDSDLQLDRISVYYNEATGGKYVPRAILVDLEPGTMDSVRSGPFGQIFRPDNFVFGQSGAGNNWAKGHYTEGAELVDSVLDVVRKEAESCDCLQGFQLTHSLGGGTGSGMGTLLISKIRQEYPDRIMNTFSVVPSPKVSDTVVEPYNATLSVHQLVQNTDETYCIDNQALYDICFRTLKATTPTYGDLNHLVSATMSGVTTCLRFPGQLNADLRKLAVNMVPFPRLHFFMPGFAPLTSRGSQQYRALTVPQLTQQVFDAKNMMAACDPRHGRYLTVAAVFRGRMSMKEVDEQMLNVQNKNSSYFVEWIPNNVKTAVCDIPPRGLKMAVTFIGNSTAIQELFKRISEQFTAMFRRKAFLHWYTGEGMDEMEFTEAESNMNDLVSEYQQYQDATAEEEQDFGEEAEEEA

SEQ ID NO: 306 - protein, 444 aa, Cricetulus griseus
MREIVHIQAGQCGNQIGAKFWEVISDEHGIDPTGTYHGDSDLQLDRISVYYNEATGGKYVPRAILVDLEPGTMDSVRSGPFGQIFRPDNFVFGQSGAGNNWAKGHYTEGAELVDSVLDVVRKEAESCDCLQGFQLTHSLGGGTGSGMGTLLISKIREEYPDRIMNTFSVVPSPKVSDTVVEPYNATLSVHQLVENTDETYCIDNQALYDICFRTLKLTTPTYGDLNHAVSATMSGVTTCLRFPGQLNADLRKLAVNMVPFPRLHFFMPGFAPLTSRGSQQYRALTVPELTQQVFDAKNMMAACDPRHGRYLTVAAVFRGRMSMKEVDEQMLNVQNKNSSYFVEWIPNNVKTAVCDIPPRGLKMAVTFIGNSTAIQELFKRISEQFTAMFRRKAFLHWYTGEGMDEMEFTEAESNMNDLVSEYQQYQDATAEEEEDFGEEAEEEA

SEQ ID NO: 307 - protein, 444 aa, Cricetulus griseus
MREIVHIQAGQCGNQIGAKFWEVISDEHGIDPTGTYHGDSDLQLDRISVYYNEATGGKYVPRAILVDLEPGTMDSVRSGPFGQIFRPDNFVFGQSGAGNNWAKGHYTEGAELVDSVLDVVRKEAESCDCLQGFQLTHSLGGGTGSGMGTLLISKIREEYPDRIMNTFSVVPSPKVSDTVVEPYNATLSVHQLVENTDQTYCIDNEALYDICFRTLKLTTPTYGDLNHLVSATMSGVTTCLRFPGQLNADLRKLAVNMVPFPRLHFFMPGFAPLTSRGSQQYRALTVPELTQQVFDAKNMMAACDPRHGRYLTVAAVFRGRMSMKEVDEQMLNVQNKNSSYFVEWIPNNVKTAVCDIPPRGLKMAVTFIGNSTAIQELFKRISEQFTAMFRRKAFLHWYTGEGMDEMEFTEAESNMNDLVSEYQQYQDATAEEEEDFGEEAEEEA

SEQ ID NO: 308 - protein, 444 aa, Cricetulus griseus
MREIVHIQAGQCGNQIGAKFWEVISDEHGIDPTGTYHGDSDLQLDRISVYYNEATGGKYVPRAILVDLEPGTMDSVRSGPFGQIFRPDNFVFGQSGAGNNWAKGHYTEGAELVDSVLDVVRKEAESCDCLQGFQLTHSLGGGTGSGMGTLLISKIREEYPDRIMNTFSVVPSPKVSDTVVEPYNATLSVHQLVENTDETYCIDNEALYDICFRTLKNTTPTYGDLNHLVSATMSGVTTCLRFPGQLNADLRKLAVNMVPFPRLHFFMPGFAPLTSRGSQQYRALTVPELTQQVFDAKNMMAACDPRHGRYLTVAAVFRGRMSMKEVDEQMLNVQNKNSSYFVEWIPNNVKTAVCDIPPRGLKMAVTFIGNSTAIQELFKRISEQFTAMFRRKAFLHWYTGEGMDEMEFTEAESNMNDLVSEYQQYQDATAEEEEDFGEEAEEEA

SEQ ID NO: 309 - protein, 444 aa, Cricetulus griseus; identical to SEQ ID NO: 308

SEQ ID NO: 310 - protein, 444 aa, Cricetulus griseus
MREIVHIQAGQCGNQIGAKFWEVISDEHGIDPTGTYHGDSDLQLDRISVYYNEATGGKYVPRAILVDLEPGTMDSVRSGPFGQIFRPDNFVFGQSGAGNNWAKGHYTEGAELVDSVLDVVRKQAESCDCLQGFQLTHSLGGGTGSGMGTLLISKIREEYPDRIMNTFSVVPSPKVSDTVVEPYNATLSVHQLVENTDETYCIDNEALYDICFRTLKLTTPTYGDLNHLVSATMSGVTTCLRFPGQLNADLRKLAVNMVPFPRLHFFMPGFAPLTSRGSQQYRALTVPELTQHVFDAKNMMAACDPRHGRYLTVAAVFRGRMSMKEVDEQMLNVQNKNSSYFVEWIPNNVKTAVCDIPPRGLKMAVTFIGNSTAIQELFKRISEQFTAMFRRKAFLHWYTGEGMDEMEFTEAESNMNDLVSEYQQYQDATAEEEEDFGEEAEEEA

SEQ ID NO: 311 - protein, 444 aa, Homo sapiens
MREIVHIQAGQCGNQIGAKFWEVISDEHGIDPTGTYHGDSDLQLDRISVYYNEATGGKYVPRAILVDLEPGTMDSVRSGPFGQIFRPDNFVFGQSGAGNNWAKGHYTEGAELVDSVLDVVRKEAESCDCLQGFQLTHSLGGGTGSGMGTLLISKIREEYPDRIMNTFSVVPSPKVSDTVVEPYNATLSVHQLVENTDETYCIDNEALYDICFRTLKLTTPTYGDMNHLVSATMSGVTTCLRFPGQLNADLRKLAVNMVPFPRLHFFMPGFAPLTSRGSQQYRALTVPELTQQVFDAKNMMAACDPRHGRYLTVAAVFRGRMSMKQVDEQMLNVQNKNSSYFVEWIPNNVKTAVCDIPPRGLKMAVTFIGNSTAIQELFKRISEQFTAMFRRKAFLHWYTGEGMDEMEFTEAESNMNDLVSEYQQYQDATAEEEEDFGQEAQEEA

SEQ ID NO: 312 - protein, 444 aa, Homo sapiens
MREIVHIQAGQCGNQIGAKFWEVISDEHGIDPTGTYHGDSDLQLDRISVYYNEATGGKYVPRAILVDLEPGTMDSVRSGPFGQIFRPDNFVFGQSGAGNNWAKGHYTEGAELVDSVLDVVRKEAESCDCLQGFQLTHSLGGGTGSGMGTLLISKIRQQYPDRIMNTFSVVPSPKVSDTVVEPYNATLSVHQLVENTDETYCIDNEALYDICFRTLKLTTPTYGDLNHLVSATMSGVTTCLRFPGQLNADLRKLAVNMVPFPRLHFFMPGFAPVTSRGSQQYRALTVPELTQQVFDAKNMMAACDPRHGRYLTVAAVFRGRMSMKEVDEQMLNVQNKNSSYFVEWIPNNVKTAVCDIPPRGLKMAVTFIGNSTAIQELFKRISEQFTAMFRRKAFLHWYTGEGMDEMEFTEAESNMNDLVSEYQQYQDATAEEEEDFGEEAEEEA

SEQ ID NO: 313 - protein, 444 aa, Homo sapiens
MREIVHIQAGQCGNQIGAKFWEVISDEHGIDPTGTYHGDSDLQLDRISVYYNEATGGKYVPRAILVDLEPGTMDSVRSGPFGQIFRPDNFVFGQSGAGNNWAKGHYTEGAELVDSVLDVVRKQAESCDCLQGFQLTHSLGGGTGSGMGTLLISKIRQEYPDRIMNTFSVVPSPKVSDTVVEPYNATLSVHQLVENTDETYCIDNEALYDICFRTLKLTTPTYGDLNHLVSATMSGVTTCLRFPGQLNADLRKLAVNMVPFPRLHFFMPGFAPLTSRGSQQYRALTVPELTQQVFDAKNMMAACDPRHGRYLTVAAVFRGRMSMKEVDEQMLNVQNKNSSYFVEWIPNNVKTAVCDIPPRGLKMADTFIGNSTAIQELFKRISEQFTAMFRRKAFLHWYTGEGMDEMEFTEAESNMNDLVSEYQQYQDATAEEEEDFGEEAEEEA

SEQ ID NO: 314 - DNA, 21 bp, Cricetulus griseus
ctccgtaggtgggcgtggtga

SEQ ID NO: 315 - DNA, 20 bp, Cricetulus griseus
ctccgtaggtgggcgtgcgc

SEQ ID NO: 316 - protein, 6 aa, Artificial Sequence
  Description of Artificial Sequence: Synthetic peptide
  MOD_RES (1): Asp or Glu
  MOD_RES (2): Lys or Arg
  MOD_RES (5): Lys or Arg
  MOD_RES (6): Phe, Tyr or Trp
XXRRXX

SEQ ID NO: 317 - protein, 9 aa, Artificial Sequence
  Description of Artificial Sequence: Synthetic peptide
  MOD_RES (1): Asp or Glu
  MOD_RES (2)..(5): This region may consist of 2 to 4 Arg or Lys residues
  MOD_RES (6): Gly or Ala
  MOD_RES (8): Pro or Leu
  MOD_RES (9): Gly or Ala
XXXXXXRXX

SEQ ID NO: 318 - protein, 8 aa, Artificial Sequence
  Description of Artificial Sequence: Synthetic peptide
  MOD_RES (1): Asp or Glu
  MOD_RES (2)..(4): Arg or Lys
  MOD_RES (5): Variable amino acid
  MOD_RES (6)..(7): Lys or Arg
  MOD_RES (8): Pro or Leu
XXXXXXXX

SEQ ID NO: 319 - protein, 6 aa, Artificial Sequence
  Description of Artificial Sequence: Synthetic peptide
  MOD_RES (1): Asp or Glu
  MOD_RES (2): Ser or Thr
  MOD_RES (3): Pro or Leu
  MOD_RES (6): Ser, Thr, or Cys
XXXKRX

SEQ ID NO: 320 - protein, 7 aa, Artificial Sequence
  Description of Artificial Sequence: Synthetic peptide
  MOD_RES (1): Asp or Glu
  MOD_RES (3): Asn, Ile, or Phe
  MOD_RES (6): Asp, Glu, or Lys
  MOD_RES (7): Ser, Thr, Met, Asn, or Gln
XKXRRXX

SEQ ID NO: 321 - protein, 7 aa, Artificial Sequence
  Description of Artificial Sequence: Synthetic peptide
  MOD_RES (1): Asp or Glu
  MOD_RES (4): Pro or Leu
  MOD_RES (5): Gly or Leu
  MOD_RES (7): Gly or Leu
XKKXXKX

SEQ ID NO: 322 - protein, 7 aa, Artificial Sequence
  Description of Artificial Sequence: Synthetic peptide
  MOD_RES (1): Asp or Glu
  MOD_RES (4): Met, Gln, or Asn
  MOD_RES (6): Met, Gln, or Asn
XKRXRXR

SEQ ID NO: 323 - protein, 7 aa, Artificial Sequence
  Description of Artificial Sequence: Synthetic peptide
  MOD_RES (1): Asp or Glu
  MOD_RES (3): Variable amino acid
  MOD_RES (7): Met, Asn, or Gln
XKXRRKX

SEQ ID NO: 324 - protein, 6 aa, Artificial Sequence
  Description of Artificial Sequence: Synthetic peptide
  MOD_RES (1): Asp or Glu
  MOD_RES (6): Asp, Glu, Pro, Leu, or Gln
XRKRRX

SEQ ID NO: 325 - protein, 7 aa, Artificial Sequence
  Description of Artificial Sequence: Synthetic peptide
  MOD_RES (1): Asp or Glu
  MOD_RES (3): Variable amino acid
XRXKKKK

SEQ ID NO: 326 - protein, 9 aa, Artificial Sequence
  Description of Artificial Sequence: Synthetic peptide
  MOD_RES (1): Asp or Glu
  MOD_RES (2)..(5): This region may consist of 2 to 4 Arg residues
  MOD_RES (6): Variable amino acid
  MOD_RES (9): Pro or Leu
XRRRRXRKX

SEQ ID NO: 327 - protein, 6 aa, Artificial Sequence
  Description of Artificial Sequence: Synthetic peptide
  MOD_RES (1): Glu or Asp
  MOD_RES (6): Glu or Asp
XRRRRX

SEQ ID NO: 328 - protein, 7 aa, Artificial Sequence
  Description of Artificial Sequence: Synthetic peptide
  MOD_RES (1): Gly or Ala
  MOD_RES (2): Lys or Arg
  MOD_RES (5): Variable amino acid
  MOD_RES (6): Lys or Arg
  MOD_RES (7): Gly or Ala
XXKRXXX

SEQ ID NO: 329 - protein, 7 aa, Artificial Sequence
  Description of Artificial Sequence: Synthetic peptide
  MOD_RES (1): Gly or Ala
  MOD_RES (3): Variable amino acid
  MOD_RES (7): Met, Asn, or Gln
XKXKKKX

SEQ ID NO: 330 - protein, 9 aa, Artificial Sequence
  Description of Artificial Sequence: Synthetic peptide
  MOD_RES (1): Gly or Ala
  MOD_RES (3): Variable amino acid
  MOD_RES (4): Arg or Lys
  MOD_RES (5): Variable amino acid
  MOD_RES (6)..(7): Arg or Lys
  MOD_RES (8): Variable amino acid
  MOD_RES (9): Gln or Met
XRXXXXXXX

SEQ ID NO: 331 - protein, 7 aa, Artificial Sequence
  Description of Artificial Sequence: Synthetic peptide
  MOD_RES (1): Gly, Ala, Pro, Leu, or Val
XRKRKKR

SEQ ID NO: 332 - protein, 30 aa, Artificial Sequence
  Description of Artificial Sequence: Synthetic peptide
  MOD_RES (1): Lys, Ala, or Arg
  MOD_RES (30): Lys or Ala
XTPIQKHWRPTVLTEGPPVKIRIETGEWEX

SEQ ID NO: 333 - protein, 10 aa, Artificial Sequence
  Description of Artificial Sequence: Synthetic peptide
  MOD_RES (1): Lys or Arg
  MOD_RES (2): Asp or Glu
  MOD_RES (3): Lys or Arg
  MOD_RES (4): Asp or Glu
  MOD_RES (5)..(6): Variable amino acid
  MOD_RES (7)..(10): Lys or Arg
XXXXXXXXXX

SEQ ID NO: 334 - protein, 7 aa, Artificial Sequence
  Description of Artificial Sequence: Synthetic peptide
  MOD_RES (1)..(7): Lys or Arg
XXXXXXX

SEQ ID NO: 335 - protein, 7 aa, Artificial Sequence
  Description of Artificial Sequence: Synthetic peptide
  MOD_RES (1)..(2): Lys or Arg
  MOD_RES (3): Gln, Met, or Asn
  MOD_RES (5): Arg or Lys
  MOD_RES (6): Gln, Met, or Asn
XXXRXXR

SEQ ID NO: 336 - protein, 9 aa, Artificial Sequence
  Description of Artificial Sequence: Synthetic peptide
  MOD_RES (1)..(2): Lys or Arg
  MOD_RES (3): Variable amino acid
  MOD_RES (4)..(6): Lys or Arg
  MOD_RES (7): Variable amino acid
  MOD_RES (8)..(9): Lys or Arg
XXXXXXXXX

SEQ ID NO: 337 - protein, 9 aa, Artificial Sequence
  Description of Artificial Sequence: Synthetic peptide
  MOD_RES (1): Lys or Arg
  MOD_RES (4)..(5): Variable amino acid
  MOD_RES (9): Arg or Lys
XGGXXGGGX

SEQ ID NO: 338 - protein, 5 aa, Artificial Sequence
  Description of Artificial Sequence: Synthetic peptide
  MOD_RES (1): Lys or Arg
XKRKK

SEQ ID NO: 339 - protein, 16 aa, Artificial Sequence
  Description of Artificial Sequence: Synthetic peptide
  MOD_RES (1): Lys or Arg
  MOD_RES (2)..(3): Variable amino acid
  MOD_RES (7)..(14): This region may consist of 6 to 8 variable amino acids
  MOD_RES (16): Lys or Arg
XXXKNKXXXXXXXXKX

SEQ ID NO: 340 - protein, 9 aa, Artificial Sequence
  Description of Artificial Sequence: Synthetic peptide
  MOD_RES (1)..(3): This region may consist of 2 to 3 Lys or Arg residues
  MOD_RES (4)..(5): Variable amino acid
  MOD_RES (8): Lys or Arg
  MOD_RES (9): Gln, Leu or Met
XXXXXKRXX

SEQ ID NO: 341 - protein, 17 aa, Artificial Sequence
  Description of Artificial Sequence: Synthetic peptide
  MOD_RES (1)..(2): Lys or Arg
  MOD_RES (3): Pro or Leu
  MOD_RES (4)..(7): Variable amino acid
  MOD_RES (8)..(9): Lys or Arg
  MOD_RES (10)..(14): This region may consist of 1 to 5 variable amino acids
XXXXXXXXXXXXXXKKK

SEQ ID NO: 342 - protein, 48 aa, Artificial Sequence
  Description of Artificial Sequence: Synthetic peptide
  MOD_RES (1)..(2): Lys or Arg
  MOD_RES (3): Variable amino acid or not present
  MOD_RES (4)..(7): This region may consist of 2 to 4 Lys or Arg residues
  MOD_RES (8)..(41): This region may consist of 25-34 variable amino acids
  MOD_RES (42)..(45): This region may consist of 2 to 4 Lys residues
  MOD_RES (46)..(47): This region may consist of 1 to 2 variable amino acids
XXXXXXXXXXXXXXXXXXXXXXXXXXXXXXXXXXXXXXXXXKKKKXXK

SEQ ID NO: 343 - protein, 34 aa, Artificial Sequence
  Description of Artificial Sequence: Synthetic peptide
  MOD_RES (1)..(4): Lys or Arg
  MOD_RES (5)..(28): This region may consist of 20 to 24 variable amino acids
  MOD_RES (29)..(32): This region may consist of 1 to 4 Lys residues
  MOD_RES (33): Variable amino acid
XXXXXXXXXXXXXXXXXXXXXXXXXXXXKKKKXK

SEQ ID NO: 344 - protein, 8 aa, Artificial Sequence
  Description of Artificial Sequence: Synthetic peptide
  MOD_RES (1): Leu or Phe
  MOD_RES (2): Ser, Thr, or Lys
  MOD_RES (3): Val, Ile, Gln, or Met
  MOD_RES (4): Lys or Arg
  MOD_RES (6): Gln, Met, Val, or Ile
  MOD_RES (7): Ser, Thr, or Lys
XXXXRXXL

SEQ ID NO: 345 - protein, 10 aa, Artificial Sequence
  Description of Artificial Sequence: Synthetic peptide
  MOD_RES (1): Met or Ile
  MOD_RES (7): His, Glu, or Gln
XVWSRDXRRK

SEQ ID NO: 346 - protein, 9 aa, Artificial Sequence
  Description of Artificial Sequence: Synthetic peptide
  MOD_RES (1): Pro or Leu
  MOD_RES (2)..(8): This region may consist of 5 to 7 Lys or Arg residues
  MOD_RES (9): Pro or Leu
XXXXXXXXX

SEQ ID NO: 347 - protein, 8 aa, Artificial Sequence
  Description of Artificial Sequence: Synthetic peptide
  MOD_RES (1)..(2): Pro or Leu
  MOD_RES (3): Variable amino acid
  MOD_RES (4): Lys or Arg
  MOD_RES (6): Asp or Glu
  MOD_RES (7): Lys or Arg
  MOD_RES (8): Gln, Ser, or Thr
XXXXRXXX

SEQ ID NO: 348 - protein, 7 aa, Artificial Sequence
  Description of Artificial Sequence: Synthetic peptide
  MOD_RES (1): Pro or Leu
  MOD_RES (2)..(3): Arg or Lys
  MOD_RES (4): Asp, Glu, or Pro
  MOD_RES (6): Arg or Lys
  MOD_RES (7): Phe, Tyr, or Trp
XXXXRXX

SEQ ID NO: 349 - protein, 7 aa, Artificial Sequence
  Description of Artificial Sequence: Synthetic peptide
  MOD_RES (1): Pro or Leu
  MOD_RES (2)..(4): Arg or Lys
  MOD_RES (5): Gly, Ala, Pro, or Leu
  MOD_RES (6): Arg or Lys
  MOD_RES (7): Ser, Thr, Gln, or Met
XXXXXXX

SEQ ID NO: 350 - protein, 11 aa, Artificial Sequence
  Description of Artificial Sequence: Synthetic peptide
  MOD_RES (1): Pro or Leu
  MOD_RES (2)..(4): This region may consist of 2 to 3 Arg or Lys residues
  MOD_RES (6): Pro, Leu, or Ile
  MOD_RES (7): Arg or Lys
  MOD_RES (8): Variable amino acid
  MOD_RES (9): Pro, Leu, or Ile
  MOD_RES (10): Variable amino acid
XXXXKXXXXXK

SEQ ID NO: 351 - protein, 7 aa, Artificial Sequence
  Description of Artificial Sequence: Synthetic peptide
  MOD_RES (1): Pro or Leu
  MOD_RES (3)..(4): Variable amino acid
XKXXKRR

SEQ ID NO: 352 - protein, 6 aa, Artificial Sequence
  Description of Artificial Sequence: Synthetic peptide
  MOD_RES (1): Pro or Leu
  MOD_RES (3): Asp or Glu
  MOD_RES (5): Asp or Glu
XRXKXR

SEQ ID NO: 353 - protein, 6 aa, Artificial Sequence
  Description of Artificial Sequence: Synthetic peptide
  MOD_RES (1): Pro or Leu
  MOD_RES (6): Pro or Leu
XRKRKX

SEQ ID NO: 354 - protein, 9 aa, Artificial Sequence
  Description of Artificial Sequence: Synthetic peptide
  MOD_RES (1): Pro or Leu
  MOD_RES (2)..(3): Variable amino acid
  MOD_RES (6): Ile or Val
  MOD_RES (8): Pro or Leu
  MOD_RES (9): Asp or Glu
XXXKRXKXX

SEQ ID NO: 355 - protein, 10 aa, Artificial Sequence
  Description of Artificial Sequence: Synthetic peptide
  MOD_RES (1): Pro, Leu, or Gln
  MOD_RES (2): Lys or Arg
  MOD_RES (3)..(6): This region may consist of 3 to 4 variable amino acids
XXXXXXKKRK

SEQ ID NO: 356 - protein, 21 aa, Artificial Sequence
  Description of Artificial Sequence: Synthetic peptide
  MOD_RES (1): Pro, Leu, or Gln
  MOD_RES (3): Arg or Lys
  MOD_RES (4)..(5): This region may consist of 1 to 2 variable amino acids
  MOD_RES (6): Arg or Lys
  MOD_RES (7)..(12): This region may consist of 3 to 6 variable amino acids
  MOD_RES (13)..(14): Arg or Lys
  MOD_RES (15)..(16): This region may consist of 1 to 2 variable amino acids
  MOD_RES (17): Arg or Lys
  MOD_RES (18)..(19): This region may consist of 1 to 2 variable amino acids
  MOD_RES (20)..(21): Arg or Lys
XKXXXXXXXXXXXXXXXXXXX

SEQ ID NO: 357 - protein, 8 aa, Artificial Sequence
  Description of Artificial Sequence: Synthetic peptide
  MOD_RES (1): Pro, Leu, Gln, Met, Lys, or Arg
  MOD_RES (3): Lys or Arg
  MOD_RES (4): Gln or Met
  MOD_RES (5): Lys or Arg
  MOD_RES (7): Variable amino acid
XRXXXRXK

SEQ ID NO: 358 - protein, 8 aa, Artificial Sequence
  Description of Artificial Sequence: Synthetic peptide
  MOD_RES (1): Pro, Leu, Gln, Met, Asn, Lys, or Arg
  MOD_RES (3)..(4): Lys or Arg
  MOD_RES (6): Variable amino acid
  MOD_RES (8): Pro, Leu, Gln, Met, Asn, Lys, or Arg
XKXXRXKX

SEQ ID NO: 359 - protein, 7 aa, Artificial Sequence
  Description of Artificial Sequence: Synthetic peptide
  MOD_RES (1): Pro, Leu, or Val
  MOD_RES (3): Arg or Lys
  MOD_RES (4): Variable amino acid
  MOD_RES (5): Gln, Met, or Asn
  MOD_RES (6): Arg or Lys
XKXXXXR

SEQ ID NO: 360 - protein, 8 aa, Artificial Sequence
  Description of Artificial Sequence: Synthetic peptide
  MOD_RES (1): Pro, Leu, or Val
  MOD_RES (3): Arg or Lys
  MOD_RES (4): Variable amino acid
  MOD_RES (5)..(7): Arg or Lys
  MOD_RES (8): Pro or Leu
XKXXXXXX

SEQ ID NO: 361 - protein, 7 aa, Artificial Sequence
  Description of Artificial Sequence: Synthetic peptide
  MOD_RES (1): Pro, Leu, or Val
  MOD_RES (4): Ser or Thr
  MOD_RES (6): Asp or Glu
XRKXRXK

SEQ ID NO: 362 - protein, 8 aa, Artificial Sequence
  Description of Artificial Sequence: Synthetic peptide
  MOD_RES (1): Pro, Val, Leu, or Ile
  MOD_RES (2)..(6): Arg or Lys
  MOD_RES (7): Gln, Met, or Asn
XXXXXXXK

SEQ ID NO: 363 - protein, 23 aa, Artificial Sequence
  Description of Artificial Sequence: Synthetic peptide
  MOD_RES (1): Gln or Leu
  MOD_RES (2)..(5): This region may consist of 2 to 4 Lys residues
  MOD_RES (6)..(17): This region may consist of 8 to 12 variable amino acids
  MOD_RES (18): Arg or Lys
  MOD_RES (19): Gln or Leu
  MOD_RES (20): Arg or Lys
  MOD_RES (21): Gln or Leu
XKKKKXXXXXXXXXXXXXXXXKR

SEQ ID NO: 364 - protein, 9 aa, Artificial Sequence
  Description of Artificial Sequence: Synthetic peptide
  MOD_RES (1): Gln or Leu
  MOD_RES (2): Variable amino acid
  MOD_RES (5): Variable amino acid
  MOD_RES (7): Variable amino acid
XXKRXKXKK

SEQ ID NO: 365 - protein, 8 aa, Artificial Sequence
  Description of Artificial Sequence: Synthetic peptide
  MOD_RES (1): Gln, Met, or Asn
  MOD_RES (3): Arg or Lys
  MOD_RES (4): Variable amino acid
  MOD_RES (6): Variable amino acid
  MOD_RES (7)..(8): Arg or Lys
XRXXKXXX

SEQ ID NO: 366 - protein, 9 aa, Artificial Sequence
  Description of Artificial Sequence: Synthetic peptide
  MOD_RES (1): Arg or Lys
  MOD_RES (2): Pro, Leu, Ile, or Val
  MOD_RES (3): Lys or Arg
  MOD_RES (4)..(7): This region may consist of 2 to 4 Arg or Lys residues
  MOD_RES (8): Pro, Leu, Val or Ile
XXXXXXXXR

SEQ ID NO: 367 - protein, 12 aa, Artificial Sequence
  Description of Artificial Sequence: Synthetic peptide
  MOD_RES (1): Arg or Lys
  MOD_RES (3): Arg or Lys
  MOD_RES (4)..(6): Variable amino acid
  MOD_RES (7)..(10): This region may consist of 2 to 4 Arg or Lys residues
  MOD_RES (11): Variable amino acid
XHXXXXXXXXXR

SEQ ID NO: 368 - protein, 10 aa, Artificial Sequence
  Description of Artificial Sequence: Synthetic peptide
  MOD_RES (1): Arg or Lys
  MOD_RES (2)..(5): This region may consist of 2 to 4 Lys residues
  MOD_RES (6): Variable amino acid
  MOD_RES (7): Arg or Lys
  MOD_RES (8): Gln or Leu
  MOD_RES (9): Arg or Lys
  MOD_RES (10): Pro or Leu
XKKKKXXXXX

SEQ ID NO: 369 - protein, 7 aa, Artificial Sequence
  Description of Artificial Sequence: Synthetic peptide
  MOD_RES (1): Arg or Lys
  MOD_RES (3): Met or Ser
  MOD_RES (5): Variable amino acid
  MOD_RES (7): Lys or Arg
XRXKXKX

SEQ ID NO: 370 - protein, 14 aa, Artificial Sequence
  Description of Artificial Sequence: Synthetic peptide
  MOD_RES (1): Arg or Lys
  MOD_RES (2): Variable amino acid
  MOD_RES (3): Arg or Lys
  MOD_RES (4): Variable amino acid
  MOD_RES (5): Lys or Arg
  MOD_RES (6)..(11): This region may consist of 4 to 6 variable amino acids
XXXXXXXXXXXRKK

SEQ ID NO: 371 - protein, 24 aa, Artificial Sequence
  Description of Artificial Sequence: Synthetic peptide
  MOD_RES (1)..(4): This region may consist of 2 to 4 Arg or Lys residues
  MOD_RES (5)..(6): This region may consist of 1 to 2 variable amino acids
  MOD_RES (7): Arg or Lys
  MOD_RES (8)..(9): This region may consist of 2 variable amino acids or is not present
  MOD_RES (10): Arg or Lys
  MOD_RES (11)..(15): This region may consist of 3 to 5 variable amino acids
  MOD_RES (16): Arg or Lys
  MOD_RES (17)..(18): This region may consist of 2 variable amino acids or is not present
  MOD_RES (19): Arg or Lys
  MOD_RES (20)..(23): This region may consist of 2 to 4 Arg or Lys residues
  MOD_RES (24): Pro or Leu
XXXXXXXXXXXXXXXXXXXXXXXX

SEQ ID NO: 372 - protein, 16 aa, Artificial Sequence
  Description of Artificial Sequence: Synthetic peptide
  MOD_RES (1)..(4): This region may consist of 2 to 4 Arg or Lys residues
  MOD_RES (5)..(8): This region may consist of 2 to 4 variable amino acids
  MOD_RES (9): Gln, Leu, or Met
  MOD_RES (10): Arg or Lys
  MOD_RES (11)..(13): This region may consist of 2 to 3 variable amino acids
  MOD_RES (14): Arg or Lys
XXXXXXXXXXXXXXKR

SEQ ID NO: 373 - protein, 19 aa, Artificial Sequence
  Description of Artificial Sequence: Synthetic peptide
  MOD_RES (1)..(3): Arg or Lys
  MOD_RES (4): Variable amino acid
  MOD_RES (5): Arg or Lys
  MOD_RES (6): Variable amino acid
  MOD_RES (7): Arg or Lys
  MOD_RES (8)..(16): This region may consist of 4 to 9 variable amino acids
  MOD_RES (17)..(19): Arg or Lys
XXXXXXXXXXXXXXXXXXX

SEQ ID NO: 374 - protein, 23 aa, Artificial Sequence
  Description of Artificial Sequence: Synthetic peptide
  MOD_RES (1)..(3): Arg or Lys
  MOD_RES (4)..(19): This region may consist of 8 to 16 variable amino acids
  MOD_RES (20)..(23): Arg or Lys
XXXXXXXXXXXXXXXXXXXXXXX

SEQ ID NO: 375 - protein, 12 aa, Artificial Sequence
  Description of Artificial Sequence: Synthetic peptide
  MOD_RES (1)..(4): Arg or Lys
  MOD_RES (5): Gln, Met, Asn, Pro, or Leu
  MOD_RES (6): Arg or Lys
  MOD_RES (7)..(10): This region may consist of 3 to 4 variable amino acids
  MOD_RES (11)..(12): Arg or Lys
XXXXXXXXXXXX

SEQ ID NO: 376 - protein, 14 aa, Artificial Sequence
  Description of Artificial Sequence: Synthetic peptide
  MOD_RES (1): Ser or Thr
  MOD_RES (3)..(5): This region may consist of 1 to 3 variable amino acids
  MOD_RES (9)..(10): This region may consist of 1 to 2 variable amino acids
  MOD_RES (14): Ser or Thr
XGXXXGGGXXGGGX

SEQ ID NO: 377 - protein, 6 aa, Artificial Sequence
  Description of Artificial Sequence: Synthetic peptide
  MOD_RES (1): Ser, Thr, Gln, or Met
  MOD_RES (6): Ser, Thr, Gln, or Met
XRKRKX

SEQ ID NO: 378 - protein, 6 aa, Artificial Sequence
  Description of Artificial Sequence: Synthetic peptide
  MOD_RES (1): Ser, Thr, Gln, or Met
  MOD_RES (6): Ser, Thr, Gln, or Met
XRKRRX

SEQ ID NO: 379 - protein, 6 aa, Artificial Sequence
  Description of Artificial Sequence: Synthetic peptide
  MOD_RES (1): Ser, Thr, Gln, or Met
  MOD_RES (6): Ser, Thr, Gln, or Met
XRRRKX

SEQ ID NO: 380 - protein, 7 aa, Artificial Sequence
  Description of Artificial Sequence: Synthetic peptide
  MOD_RES (1): Thr or Ser
  MOD_RES (2): Arg or Lys
  MOD_RES (5): Val, Leu, or Ile
  MOD_RES (7): Pro or Leu
XXKKXRX

SEQ ID NO: 381 - protein, 6 aa, Artificial Sequence
  Description of Artificial Sequence: Synthetic peptide
  MOD_RES (1): Tyr, Phe, or Trp
  MOD_RES (6): Pro or Leu
XRRRRX

SEQ ID NO: 382 - protein, 11 aa, Artificial Sequence
  Description of Artificial Sequence: Synthetic peptide
APKRKSGVSKC

SEQ ID NO: 383 - protein, 8 aa, Artificial Sequence
  Description of Artificial Sequence: Synthetic peptide
APTKRKGS

SEQ ID NO: 384 - protein, 13 aa, Artificial Sequence
  Description of Artificial Sequence: Synthetic peptide
CKRKTTNADRRKA

SEQ ID NO: 385 - protein, 17 aa, Artificial Sequence
  Description of Artificial Sequence: Synthetic peptide
CYGSKNTGAKKRKIDDA

SEQ ID NO: 386 - protein, 8 aa, Artificial Sequence
  Description of Artificial Sequence: Synthetic peptide
  MOD_RES (2): Lys or Arg
  MOD_RES (3): Variable amino acid or not present
  MOD_RES (4): Gln or Leu
  MOD_RES (5)..(7): This region may consist of 2 to 3 Arg or Lys residues
DXXXXXXR

SEQ ID NO: 387 - protein, 6 aa, Artificial Sequence
  Description of Artificial Sequence: Synthetic peptide
  MOD_RES (3): Gln or Leu
  MOD_RES (6): Gln or Leu
DKXKKX

SEQ ID NO: 388 - protein, 8 aa, Artificial Sequence
  Description of Artificial Sequence: Synthetic peptide
  MOD_RES (3): Met or Asn
DRXKKKKE

SEQ ID NO: 389 - protein, 12 aa, Artificial Sequence
  Description of Artificial Sequence: Synthetic peptide
EEDGPQKKKRRL

SEQ ID NO: 390 - protein, 11 aa, Artificial Sequence
  Description of Artificial Sequence: Synthetic peptide
EYLSRKGKLEL

SEQ ID NO: 391 - protein, 21 aa, Artificial Sequence
  Description of Artificial Sequence: Synthetic peptide
  MOD_RES (4)..(6): Variable amino acid
  MOD_RES (11)..(16): Variable amino acid
GGGXXXKNRRXXXXXXRGGRN

SEQ ID NO: 392 - protein, 9 aa, Artificial Sequence
  Description of Artificial Sequence: Synthetic peptide
GKKKYKLKH

SEQ ID NO: 393 - protein, 7 aa, Artificial Sequence
  Description of Artificial Sequence: Synthetic peptide
GKKRSKA

SEQ ID NO: 394 - protein, 10 aa, Artificial Sequence
  Description of Artificial Sequence: Synthetic peptide
  MOD_RES (3)..(6): This region may consist of 2 to 4 Arg or Lys residues
  MOD_RES (7)..(8): Variable amino acid
  MOD_RES (9): Arg or Lys
  MOD_RES (10): Gln or Leu
GRXXXXXXXX

SEQ ID NO: 395 - protein, 8 aa, Artificial Sequence
  Description of Artificial Sequence: Synthetic peptide
GRKRKKRT

SEQ ID NO: 396 - protein, 11 aa, Artificial Sequence
  Description of Artificial Sequence: Synthetic peptide
  MOD_RES (1)..(4): This region may consist of 2 to 4 Gly residues
  MOD_RES (5): Arg or Lys
  MOD_RES (6)..(8): This region may consist of 1 to 3 variable amino acids
GGGGXXXXGGG

SEQ ID NO: 397 - protein, 40 aa, Artificial Sequence
  Description of Artificial Sequence: Synthetic peptide
HKKKKIRTSPTFTTPKTLRLRRQPKYPRKSAPRRNKLDHY

SEQ ID NO: 398 - protein, 17 aa, Artificial Sequence
  Description of Artificial Sequence: Synthetic peptide
HRIEEKRKRTYETFKSI

SEQ ID NO: 399 - protein, 19 aa, Artificial Sequence
  Description of Artificial Sequence: Synthetic peptide
  MOD_RES (10)..(15): Variable amino acid
KRKYEAPRHXXXXXXPRKR

SEQ ID NO: 400 - protein, 10 aa, Artificial Sequence
  Description of Artificial Sequence: Synthetic peptide
IKYFKKFPKD

SEQ ID NO: 401 - protein, 7 aa, Artificial Sequence
  Description of Artificial Sequence: Synthetic peptide
  MOD_RES (2): Gly or Ala
  MOD_RES (4): Ala or Gly
  MOD_RES (7): Ala or Gly
KXKXKKX

SEQ ID NO: 402 - protein, 7 aa, Artificial Sequence
  Description of Artificial Sequence: Synthetic peptide
  MOD_RES (2): Ile, Val, Gln, or Met
  MOD_RES (5): Val or Ile
  MOD_RES (6): Ser, Thr, or Lys
KXRRXXL

SEQ ID NO: 403 - protein, 6 aa, Artificial Sequence
  Description of Artificial Sequence: Synthetic peptide
  MOD_RES (2)..(3): Lys or Arg
  MOD_RES (6): Lys or Arg
KXXRRX

SEQ ID NO: 404 - protein, 7 aa, Artificial Sequence
  Description of Artificial Sequence: Synthetic peptide
  MOD_RES (2): Lys or Arg
  MOD_RES (3): Gln, Met, or Asn
  MOD_RES (4): Arg or Lys
  MOD_RES (6): Gln, Met, or Asn
KXXXRXR

SEQ ID NO: 405 - protein, 7 aa, Artificial Sequence
  Description of Artificial Sequence: Synthetic peptide
  MOD_RES (2): Met, Asn, or Gln
  MOD_RES (5): Pro, Leu, Val, or Ile
  MOD_RES (7): Pro or Leu
KXRRXKX

SEQ ID NO: 406 - protein, 23 aa, Artificial Sequence
  Description of Artificial Sequence: Synthetic peptide
  MOD_RES (2): Pro or Leu
  MOD_RES (3)..(5): This region may consist of 2 to 3 Lys residues
  MOD_RES (6)..(8): This region may consist of 1 to 3 variable amino acids
  MOD_RES (9)..(12): This region may consist of 2 to 4 Arg or Lys residues
  MOD_RES (13)..(21): This region may consist of 6 to 9 variable amino acids
  MOD_RES (23): Lys or Arg
KXKKKXXXXXXXXXXXXXXXXKX

SEQ ID NO: 407 - protein, 8 aa, Artificial Sequence
  Description of Artificial Sequence: Synthetic peptide
  MOD_RES (2): Pro or Leu
  MOD_RES (6): Variable amino acid
KXKKKXKK

SEQ ID NO: 408 - protein, 6 aa, Artificial Sequence
  Description of Artificial Sequence: Synthetic peptide
  MOD_RES (2): Pro, Leu, Met, or Asn
  MOD_RES (6): Met, Asn, or Gln
KXRRKX

SEQ ID NO: 409 - protein, 7 aa, Artificial Sequence
  Description of Artificial Sequence: Synthetic peptide
  MOD_RES (2)..(5): This region may consist of 2 to 4 Arg or Lys residues
  MOD_RES (6): Ser or Thr
KXXXXXH

SEQ ID NO: 410 - protein, 15 aa, Artificial Sequence
  Description of Artificial Sequence: Synthetic peptide
  MOD_RES (2)..(3): Arg or Lys
  MOD_RES (4): Gln or Leu
  MOD_RES (5)..(12): This region may consist of 3 to 8 variable amino acids
KXXXXXXXXXXXRRR

SEQ ID NO: 411 - protein, 30 aa, Artificial Sequence
  Description of Artificial Sequence: Synthetic peptide
  MOD_RES (2)..(6): This region may consist of 3 to 5 Arg or Lys residues
  MOD_RES (7)..(24): This region may consist of 11 to 18 variable amino acids
  MOD_RES (25): Arg or Lys
  MOD_RES (27)..(29): This region may consist of 2 to 3 variable amino acids
KXXXXXXXXXXXXXXXXXXXXXXXXKXXXK

SEQ ID NO: 412 - protein, 6 aa, Artificial Sequence
  Description of Artificial Sequence: Synthetic peptide
KAKRQR

SEQ ID NO: 413 - protein, 20 aa, Artificial Sequence
  Description of Artificial Sequence: Synthetic peptide
KDCVINKHHRNRCQYCRLQR

SEQ ID NO: 414 - protein, 6 aa, Artificial Sequence
  Description of Artificial Sequence: Synthetic peptide
KHLKGR

SEQ ID NO: 415 - protein, 7 aa, Artificial Sequence
  Description of Artificial Sequence: Synthetic peptide
KHRKHPG

SEQ ID NO: 416 - protein, 7 aa, Artificial Sequence
  Description of Artificial Sequence: Synthetic peptide
  MOD_RES (3): Met, Asn, Gln, Ser, Thr, or Cys
  MOD_RES (5): Met, Asn, Gln, Ser, Thr, or Cys
  MOD_RES (7): Met, Asn, Gln, Ser, Thr, or Cys
KKXRXKX

SEQ ID NO: 417 - protein, 9 aa, Artificial Sequence
  Description of Artificial Sequence: Synthetic peptide
KKEKKKSKK

SEQ ID NO: 418 - protein, 5 aa, Artificial Sequence
  Description of Artificial Sequence: Synthetic peptide motif
RKRKK
